(19) United States
(12) Patent Application Publication
(10) Pub. No.: US 2005/0177901 A1
(43) Pub. Date: Aug. 11, 2005

(54) Identification and characterization of plant genes

(75) Inventors: Tong Zhu, Research Triangle Park, NC (US); Wengiong Chen, San Diego, CA (US); Steven P. Briggs, Del Mar, CA (US); Bret Cooper, La Jolla, CA (US); Stephen A. Goff, Research Triangle Park, NC (US); Todd Moughamer, Research Triangle Park, NC (US); Jane GlazeBrook, San Diego, CA (US); Fumiaki Katagiri, St. Paul, CA (US); Joel Kreps, San Diego, CA (US); Nicolas J. Provart, Toronto (CA); Darrell Ricke, Research Triangle Park, NC (US)

Correspondence Address: JENKINS, WILSON & TAYLOR, P. A., 3100 TOWER BLVD, SUITE 1400, DURHAM, NC, 27707, US

(73) Assignee: SYNGENTA PARTICIPATIONS AG

(21) Appl. No.: 10/481,032

(22) PCT Filed: Jun. 21, 2002
(86) PCT No.: PCT/IB02/02450

(51) Int. Cl. C12Q 1/68; C07H 21/04; C12N 9/20; C12N 9/24; A01H 1/00; C12N 15/82

(52) U.S. Cl. 800/281; 435/6; 435/198; 435/200; 536/23.2; 435/419; 435/468

(57) ABSTRACT

The invention discloses a set of genes the expression products of which are up-regulated during the grain filling process in rice and active in different metabolic pathways involved in nutrient partitioning. The invention also discloses the use of said genes to modify the compositional and nutritional characteristics of the plant grain.

[0001] The present invention is in the area of plant biotechnology. In particular, the invention relates to a set of genes the expression products of which are up-regulated during the grain filling process in rice and active in different metabolic pathways involved in nutrient partitioning. The invention also relates to the use of said genes to modify the compositional and nutritional characteristics of the plant grain.

[0002] It has been long recognized that the value of agricultural products such as cereal grains and the like are affected by the quality of their inherent constituent components: In particular, cereal grains with improved protein, oil, starch, fiber, and moisture content and desirable levels of carbohydrates and other constituents are of economic interest.

[0003] In rice, for example, yield, nutritional characteristics and eating quality are the most important economic traits. The first two traits are mostly determined by the composition and accumulation of carbohydrates, proteins, and minerals during grain filling, and the latter by the interaction of various Xs enzymes to produce the final structure of the starch at the molecular and granule levels. Manipulation of these pathways results in significant improvement in the nutritional value. For example, reduction of the amounts of even one enzyme, granule-bound starch synthase, in the starch biosynthetic pathway can dramatically affect the eating quality, resulting in softer, less sticky cooked rice. Some genes participating in nutrient partitioning during rice grain filling and affecting starch quality have been previously identified. However, genes participated in these processes and their transcriptional controls are poorly understood.

[0004] Within the scope of the present invention a set of genes is now provided which were shown to be involved in the grain filling process based on their mRNA expression characteristics. The genes within this subset are preferentially up-regulated and share a similar expression pattern during the process of grain filling. The expression levels of those genes increase synchronously during grain development while the encoded gene products are active in different pathways. The genes within this subgroup, representative examples of which are provided in the Sequence Listing, are thus useful tools for generating plants which produce grain with modified compositional characteristics leading to improved nutritional properties.

[0005] One of the main objectives of the present invention is thus to provide a polynucleotide comprising a nucleotide sequence encoding a polypeptide the expression of which is up-regulated during grain filling and the use of said molecule for modifying the nutritional composition and quality of plant grain.

[0006] The majority of the genes within this group encode protein products that are directly involved in or associated with three major pathways of nutrition partitioning: the synthesis and transport of (1) carbohydrates, (2) proteins, and (3) fatty acids.

[0007] The most dramatic increase in relative mRNA expression levels is shown by those genes whose products control the synthesis of carbohydrates and proteins and can be found in the endosperm of the developing seed, which is the main sink for plant nutrients.

[0008] The other group of genes which shows a significant increase in relative mRNA expression levels comprises genes that are involved in and in control of fatty acid biosynthesis. These genes have a more balanced expression between the embryo and endosperm.

[0009] In one embodiment the invention thus relates to a subset of isolated nucleic acid molecules comprising a nucleotide sequence encoding a polypeptide that is involved in at least one of the major pathways of nutrition partitioning selected from the group consisting of synthesis, transport, metabolism or degradation of carbohydrates, proteins, and fatty acids.

[0010] Another subset of nucleic acid molecules provided herein comprises a number of nucleic acids that encode different transporters, such as sugar transporters, ABC transporters, amino acid/peptide transporters, phosphate transporters, and nitrate transporters.

[0011] Still another subset of nucleic acid molecules that is provided as part of the invention comprises nucleic acid molecules that are involved in the transcriptional control of the highly coordinated grain filling process.

[0012] Further subsets of nucleic acid molecules provided herein comprise nucleic acid molecules the expression products of which are associated with amino acid metabolism; signal transduction; and stress regulation, respectively.

[0013] In a collective embodiment applicable to all of the nucleic acid molecules disclosed herein, the invention relates to the use of the nucleic acid molecules according to the invention as hybridization probes, for chromosome and gene mapping, in PCR technologies, in the production of sense or antisense nucleic acids, in screening for new therapeutic molecules, in production of plants and seeds having desirable, inheritable, commercially useful phenotypes, or in discovery of inhibitory compounds.

[0014] The invention further relates to any polypeptides encoded by the nucleic acid molecules according to the invention, or any antigene sequences thereof, which have numerous applications using techniques that are known to those skilled in the art of molecular biology, biotechnology, biochemistry, genetics, physiology or pathology.

[0015] In a further collective embodiment, the present invention provides the ability to modulate the grain filling process, by over-expressing, under-expressing or knocking out one or more of the genes disclosed herein or their gene products, in a plant cell, in vitro or in planta. Expression vectors comprising at least one nucleic acid molecule according to the invention, or any antigenes thereof, operably linked to at least one suitable promoter and/or regulatory sequence can be used to study the role of polypeptides encoded by said sequences, for example by transforming a host cell with said expression vector and measuring the effects of overexpression and underexpression of said nucleic acid molecules. Suitable promoter and/or regulatory sequences include especially those that are preferentially or specifically active in plant grain tissue such as, for example, the grain endosperm or the grain embryo. A host cell transformed with at least one expression vector comprising at least one nucleic acid molecule of the invention, operably linked to suitable promoters and/or regulatory sequences, can be useful to produce a plant grain with improved nutritional or dietary properties.

[0016] In a further collective embodiment, the present invention provides a transformed plant host cell, or one obtained through breeding, capable of over-expressing, under-expressing, or having a knock out of at least one of the genes according to the invention and/or their gene products.

[0017] Such a plant cell, transformed with at least one expression vector comprising a nucleic acid molecule of the invention, operably linked to suitable promoters and/or regulatory sequences, can be used to regenerate plant tissue or an entire plant, or seed there from, in which the effects of expression, including overexpression or underexpression, of the introduced sequence or sequences can be measured in vitro or in planta.

[0018] In a further embodiment the present invention provides nucleotide sequences including regions of nucleotide sequence encoding polypeptides having homology to at least one functional protein domain (FPD). Embodiments of the invention further provide polypeptides including regions of amino acid sequence having homology to an FPD. In cases where the polypeptide has homology to an FPD in the same or closely related species, the polypeptide may represent a paralogous sequence or paralog, or may represent a variant allele of a gene encoding the FPD. In cases where the polypeptide has homology to an FPD in another species, including other plant species and especially non-plant species, polypeptides may represent orthologous sequences, or orthologs, of the FPD.

[0019] In a further collective embodiment of the invention the nucleic acid molecules disclosed herein or respresentative parts thereof can be used in hybridization-based assays for detecting and identifying nucleic acid molecules that encode protein products that are involved in the grain filling process, more particularly in at least one of the major pathways of nutrition partitioning selected from the group consisting of synthesis, transport, metabolism or degradation of carbohydrates, proteins, and fatty acids, in plants other than rice, but especially in plants belonging to the cereal group.

[0020] Embodiments of the present invention provide a unique oligonucleotide having a sequence identical to or complementary to a region of a polynucleotide sequence encoding at least a portion of a homologue of a protein according to the invention representatives of which are identified by SEQ ID NOs 2-462, 502-512, and 514-642 provided in the Sequence Listing and/or an FPD thereof, the oligonucleotide being identified by the methods disclosed herein. In one embodiment, the unique oligonucleotide has a length of between 12 and 250 nucleotide bases.

[0021] Embodiments of the present invention also provide a nucleotide microarray comprising the unique oligonucleotide having a sequence identical to or complementary to a region of polynucleotide sequence encoding at least a portion of a homologue of a protein according to the invention representatives of which are identified by SEQ ID NOs: 2-462, 502-512, and 514-642 provided in the Sequence Listing and/or an FPD thereof. Preferably, the microarray includes a plurality of different, unique oligonucleotides, the sequences corresponding to a plurality of homologues of a protein according to the invention representatives of which are identified by the SEQ ID NOs provided in the Sequence Listing and/or an FPD thereof. Equally preferably, the microarray contains at least about 96 different unique oligonucleotides, wherein each of the 96 different unique oligonucleotides has a sequence that is identical, complementary, or substantial similarity to a segment of a nucleotide sequence as given in SEQ ID NOs: 1-461, 501-511, and 513-641 provided in the Sequence Listing.

[0022] Embodiments of the present invention also provide a kit for detecting the presence of a polynucleotide, the kit containing a first nucleotide probe which can hybridize with a region of a nucleotide sequence including the nucleotide sequences of SEQ ID NOs: 1-461 provided in the Sequence Listing, a fragment or a variant thereof, and a complementary sequence thereto, the kit further containing at least one additional component such as, for example: a second nucleotide probe, a buffer, an enzyme, a label, a molecular weight standard, a reaction chamber, and a micropipette tip.

[0023] Embodiments of the present invention further provide a kit for detecting the presence of a polypeptide, the kit containing a first probe which can hybridize with a region of a polypeptide including the amino acid sequences of SEQ ID NOs: 2-462, 502-512, and 514-642 provided in the Sequence Listing, a fragment or a variant thereof, and optionally, the kit further containing at least one additional component such as, for example: a probe, a buffer, an enzyme, a label, a molecular weight standard, a reaction chamber, and a micropipette tip. Probes useful in kit embodiments include antibodies, affinity tags, protein A, protein G, or protein-binding substances including chromatographic media.

[0024] An additional aspect provides a method for selecting plants, for example cereals, having an altered carbohydrate, protein or fatty acid content and/or composition of the grain comprising obtaining nucleic acid molecules from the plants to be selected, contacting the nucleic acid molecules with one or more probes that selectively hybridize under stringent or highly stringent conditions to a nucleic acid sequence selected from the group consisting of SEQ ID NOs. 1-461, 501-511, and 513-641; detecting the hybridization of the one or more probes to the nucleic acid sequences wherein the presence of the hybridization indicates the presence of a gene associated with altered carbohydrate, protein or fatty acid content and/or composition of the grain; and selecting plants on the basis of the presence or absence of such hybridization. In one embodiment, marker-assisted selection is accomplished in rice. In another embodiment, marker assisted selection is accomplished in wheat using one or more probes which selectively hybridize under stringent or highly stringent conditions to sequences selected from the group consisting of SEQ ID NOs. 951-1105. In yet another embodiment, marker assisted selection is accomplished in maize or corn using one or more probes which selectively hybridize under stringent or highly stringent conditions to sequences selected from the group consisting of SEQ ID NOs. 1106-1201. In still another embodiment, marker assisted selection is accomplished in banana using one or more probes which selectively hybridize under stringent or highly stringent conditions to sequences selected from the group consisting of SEQ ID NOs. 884-950. In each case marker-assisted selection can be accomplished using a probe or probes to a single sequence or multiple sequences. If multiple sequences are used they can be used simultaneously or sequentially.

[0025] In a further embodiment of the invention a computer readable medium containing one or more of the nucleotide sequences of the invention is provided as well as methods of use for the computer readable medium. This medium allows a nucleotide sequence corresponding to at least one of the sequences selected from the group consisting of SEQ ID NOs: 1-461, 501-511, and 513-641 and 884-1201 provided in the Sequence Listing (open reading frames or fragments thereof), to be used as a reference sequence to search against a database. This medium also allows for computer-based manipulation of a nucleotide sequence corresponding to at least one of the sequences selected from the group consisting of SEQ ID NOs: 1-461, 501-511, and 513-641, 884-1201 provided in the Sequence Listing.

[0026] Further aspects, features and advantages of this invention will become apparent from the detailed description of the preferred embodiments that follow.

[0027] A further aspect provides a computer readable medium having stored thereon computer executable instructions for performing a method comprising receiving data on nucleotide sequence expression in a test plant of at least one nucleic acid molecule having at least 70%, at least 80%, at least 90% or at least 95%, sequence identity to a nucleotide sequence selected from the group consisting of SEQ ID NOs: 1-461, 501-511, and 513-641; and 884-1201 and comparing expression data from said test plant to expression data for the same nucleotide sequence or sequences in a plant during grain filling.

### BRIEF DESCRIPTION OF THE SEQUENCE LISTING

[0028] In the following, a brief description of the sequences in the Sequence Listing is provided:

[0029] Odd numbered SEQ ID NOs:1-461 are representing a first sub-group (sub-group I) of polynucleotides comprising nucleotide sequences which encode polypeptides that are up-regulated during grain filling and are described in Tables 1-11 below.

[0030] Even numbered SEQ ID NOs:2-462 are protein sequences encoded by the immediately preceding nucleotide sequence, e.g., SEQ ID NO:2 is the protein encoded by the nucleotide sequence of SEQ ID NO:1, SEQ ID NO:4 is the protein encoded by the nucleotide sequence of SEQ ID NO:3, etc.

[0031] Odd numbered SEQ ID NOs: 501-511 are representing a second sub-group (sub-group II) of polynucleotides comprising rice cDNA sequences. The correlation between the sequences in sub-groups I and II is illustrated in Table 13.

[0032] Even numbered SEQ ID NOs:502-512 are protein sequences encoded by the immediately preceding nucleotide sequence.

[0033] Odd numbered SEQ ID NOs: 513-641 are representing a third sub-group (sub-group III) of polynucleotides comprising nucleotide sequences that have homologies between 80% and 99.90% to the nucleotide sequences of sub-group I and possible variants or familiy members of rice sequences provided in SEQ ID NOs: 1-461. The correlation between the sequences in sub-groups I and III is illustrated in Table 12.

[0034] Even numbered SEQ ID NOs:514-642 are protein sequences encoded by the immediately preceding nucleotide sequence.

[0035] SEQ ID NOs: 643-883 are promoter sequences.

[0036] SEQ ID NOs: 884-950 are banana sequences which show homology to rice “grain filling” genes.

[0037] SEQ ID NOs: 951-1105 are wheat sequences which show homology to rice “grain filling” genes.

[0038] SEQ ID NOs: 1106-1201 are maize sequences which show homology to rice “grain filling” genes.

Definitions

[0039] For clarity, certain terms used in the specification are defined and presented as follows:

[0040] The term “gene” is used broadly to refer to any segment of nucleic acid associated with a biological function. Thus, genes include coding sequences and/or the regulatory sequences required for their expression. For example, gene refers to a nucleic acid fragment that expresses mRNA or functional RNA, or encodes a specific protein, and which includes regulatory sequences. Genes also include nonexpressed DNA segments that, for example, form recognition sequences for other proteins. Genes can be obtained from a variety of sources, including cloning from a source of interest or synthesizing from known or predicted sequence information, and may include sequences designed to have desired parameters.

[0041] The term “native” or “wild type” gene refers to a gene that is present in the genome of an untransformed cell, i.e., a cell not having a known mutation.

[0042] A “marker gene” encodes a selectable or screenable trait.

[0043] The term “chimeric gene” refers to any gene that contains 1) DNA sequences, including regulatory and coding sequences, that are not found together in nature, or 2) sequences encoding parts of proteins not naturally adjoined, or 3) parts of promoters that are not naturally adjoined. Accordingly, a chimeric gene may comprise regulatory sequences and coding sequences that are derived from different sources, or comprise regulatory sequences and coding sequences derived from the same source, but arranged in a manner different from that found in nature.

[0044] A “transgene” refers to a gene that has been introduced into the genome by transformation and is stably maintained. Transgenes may include, for example, genes that are either heterologous or homologous to the genes of a particular plant to be transformed. Additionally, transgenes may comprise native genes inserted into a normative organism, or chimeric genes. The term “endogenous gene” refers to a native gene in its natural location in the genome of an organism. A “foreign” gene refers to a gene not normally found in the host organism but that is introduced by gene transfer.

[0045] An “oligonucleotide” corresponding to a nucleotide sequence of the invention, e.g., for use in probing or amplification reactions, may be about 30 or fewer nucleotides in length (e.g., 9, 12, 15, 18, 20, 21 or 24, or any number between 9 and 30). Generally specific primers are upwards of 14 nucleotides in length. For optimum specificity and cost effectiveness, primers of 16 to 24 nucleotides in length may be preferred. Those skilled in the art are well versed in the design of primers for use processes such as PCR. If required, probing can be done with entire restriction fragments of the gene disclosed herein which may be 100's or even 1000's of nucleotides in length.

[0046] The terms “protein,” “peptide” and “polypeptide” are used interchangeably herein.

[0047] The nucleotide sequences of the invention can be introduced into any plant. The genes to be introduced can be conveniently used in expression cassettes for introduction and expression in any plant of interest. Such expression cassettes will comprise the transcriptional initiation region of the invention linked to a nucleotide sequence of interest. Preferred promoters include constitutive, tissue-specific, development-specific, inducible and/or viral promoters. Such an expression cassette is provided with a plurality of restriction sites for insertion of the gene of interest to be under the transcriptional regulation of the regulatory regions. The expression cassette may additionally contain selectable marker genes. The cassette will include in the 5′-3′ direction of transcription, a transcriptional and translational initiation region, a DNA sequence of interest, and a transcriptional and translational termination region functional in plants. The termination region may be native with the transcriptional initiation region, may be native with the DNA sequence of interest, or may be derived from another source. Convenient termination regions are available from the Ti-plasmid of A. tumefaciens, such as the octopine synthase and nopaline synthase termination regions. See also, Guerineau et al., 1991; Proudfoot, 1991; Sanfacon et al., 1991; Mogen et al., 1990; Munroe et al., 1990; Ballas et al., 1989; Joshi et al., 1987.

[0048] “Coding sequence” refers to a DNA or RNA sequence that codes for a specific amino acid sequence and excludes the non-coding sequences. It may constitute an “uninterrupted coding sequence”, i.e., lacking an intron, such as in a cDNA or it may include one or more introns bounded by appropriate splice junctions. An “intron” is a sequence of RNA which is contained in the primary transcript but which is removed through cleavage and re-ligation of the RNA within the cell to create the mature mRNA that can be translated into a protein.

[0049] The terms “open reading frame” and “ORF” refer to the amino acid sequence encoded between translation initiation and termination codons of a coding sequence. The terms “initiation codon” and “termination codon” refer to a unit of three adjacent nucleotides (‘codon’) in a coding sequence that specifies initiation and chain termination, respectively, of protein synthesis (mRNA translation).

[0050] A “functional RNA” refers to an antisense RNA, ribozyme, or other RNA that is not translated.

[0051] The term “RNA transcript” refers to the product resulting from RNA polymerase catalyzed transcription of a DNA sequence. When the RNA transcript is a perfect complementary copy of the DNA sequence, it is referred to as the primary transcript or it may be a RNA sequence derived from posttranscriptional processing of the primary transcript and is referred to as the mature RNA.

[0052] “Messenger RNA” (mRNA) refers to the RNA that is without introns and that can be translated into protein by the cell. “cDNA” refers to a single- or a double-stranded DNA that is complementary to and derived from mRNA.

[0053] “Regulatory sequences” and “suitable regulatory sequences” each refer to nucleotide sequences located upstream (5′ non-coding sequences), within, or downstream (3′ noncoding sequences) of a coding sequence, and which influence the transcription, RNA processing or stability, or translation of the associated coding sequence. Regulatory sequences include enhancers, promoters, translation leader sequences, introns, and polyadenylation signal sequences. They include natural and synthetic sequences as well as sequences which may be a combination of synthetic and natural sequences. As is noted above, the term “suitable regulatory sequences” is not limited to promoters.

[0054] “5′ noncoding sequence” refers to a nucleotide sequence located 5′ (upstream) to the coding sequence. It is present in the fully processed mRNA upstream of the initiation codon and may affect processing of the primary transcript to mRNA, mRNA stability or translation efficiency (Turner et al., 1995).

[0055] “3′ non-coding sequence” refers to nucleotide sequences located 3′ (downstream) to a coding sequence and include polyadenylation signal sequences and other sequences encoding regulatory signals capable of affecting mRNA processing or gene expression. The polyadenylation signal is usually characterized by affecting the addition of polyadenylic acid tracts to the 3′ end of the mRNA precursor. The use of different 3′ non-coding sequences is exemplified by Ingelbrecht et al., 1989.

[0056] The term “translation leader sequence” refers to that DNA sequence portion of a gene between the promoter and coding sequence that is transcribed into RNA and is present in the fully processed mRNA upstream (5′) of the translation start codon. The translation leader sequence may affect processing of the primary transcript to mRNA, mRNA stability or translation efficiency.

[0057] “Signal peptide” refers to the amino terminal extension of a polypeptide, which is translated in conjunction with the polypeptide forming a precursor peptide and which is required for its entrance into the secretory pathway. The term “signal sequence” refers to a nucleotide sequence that encodes the signal peptide.

[0058] “Promoter” refers to a nucleotide sequence, usually upstream (5′) to its coding sequence, which controls the expression of the coding sequence by providing the recognition for RNA polymerase and other factors required for proper transcription. “Promoter” includes a minimal promoter that is a short DNA sequence comprised of a TATA box and other sequences that serve to specify the site of transcription initiation, to which regulatory elements are added for control of expression. “Promoter” also refers to a nucleotide sequence that includes a minimal promoter plus regulatory elements that is capable of controlling the expression of a coding sequence or functional RNA. This type of promoter sequence consists of proximal and more distal upstream elements, the latter elements often referred to as enhancers. Accordingly, an “enhancer” is a DNA sequence which can stimulate promoter activity and may be an innate element of the promoter or a heterologous element inserted to enhance the level or tissue specificity of a promoter. It is capable of operating in both orientations (normal or flipped), and is capable of functioning even when moved either upstream or downstream from the promoter. Both enhancers and other upstream promoter elements bind sequence-specific DNA-binding proteins that mediate their effects. Promoters may be derived in their entirety from a native gene, or be composed of different elements derived from different promoters found in nature, or even be comprised of synthetic DNA segments. A promoter may also contain DNA sequences that are involved in the binding of protein factors which control the effectiveness of transcription initiation in response to physiological or developmental conditions.

[0059] The “initiation site” is the position surrounding the first nucleotide that is part of the transcribed sequence, which is also defined as position+1. With respect to this site all other sequences of the gene and its controlling regions are numbered. Downstream sequences (i.e., further protein encoding sequences in the 3′ direction) are denominated positive, while upstream sequences (mostly of the controlling regions in the 5′ direction) are denominated negative.

[0060] Promoter elements, particularly a TATA element, that are inactive or that have greatly reduced promoter activity in the absence of upstream activation are referred to as “minimal or core promoters.” In the presence of a suitable transcription factor, the minimal promoter functions to permit transcription. A “minimal or core promoter” thus consists only of all basal elements needed for transcription initiation, e.g., a TATA box and/or an initiator.

[0061] “Constitutive expression” refers to expression using a constitutive or regulated promoter. “Conditional” and “regulated expression” refer to expression controlled by a regulated promoter.

[0062] “Constitutive promoter” refers to a promoter that is able to express the open reading frame (ORF) that it controls in all or nearly all of the plant tissues during all or nearly all developmental stages of the plant. Each of the transcription-activating elements do not exhibit an absolute tissue-specificity, but mediate transcriptional activation in most plant parts at a level of ≧1% of the level reached in the part of the plant in which transcription is most active.

[0063] “Regulated promoter” refers to promoters that direct gene expression not constitutively, but in a temporally- and/or spatially-regulated manner, and includes both tissue-specific and inducible promoters. It includes natural and synthetic sequences as well as sequences which may be a combination of synthetic and natural sequences. Different promoters may direct the expression of a gene in different tissues or cell types, or at different stages of development, or in response to different environmental conditions. New promoters of various types useful in plant cells are constantly being discovered, numerous examples may be found in the compilation by Okamuro et al. (1989). Typical regulated promoters useful in plants include but are not limited to safener-inducible promoters, promoters derived from the tetracycline-inducible system, promoters derived from salicylate-inducible systems, promoters derived from alcohol inducible systems, promoters derived from glucocorticoid-inducible system, promoters derived from pathogen-inducible systems, and promoters derived from ecdysome-inducible systems.

[0064] “Tissue-specific promoter” refers to regulated promoters that are not expressed in all plant cells but only in one or more cell types in specific organs (such as leaves or seeds), specific tissues (such as embryo or cotyledon), or specific cell types (such as leaf parenchyma or seed storage cells). These also include promoters that are temporally regulated, such as in early or late embryogenesis, during fruit ripening in developing seeds or fruit, in fully differentiated leaf, or at the onset of senescence.

[0065] “Inducible promoter” refers to those regulated promoters that can be turned on in one or more cell types by an external stimulus, such as a chemical, light, hormone, stress, or a pathogen.

[0066] “Operably-linked” refers to the association of nucleic acid sequences on single nucleic acid fragment so that the function of one is affected by the other. For example, a regulatory DNA sequence is said to be “operably linked to” or “associated with” a DNA sequence that codes for an RNA or a polypeptide if the two sequences are situated such that the regulatory DNA sequence affects expression of the coding DNA sequence (i.e., that the coding sequence or functional RNA is under the transcriptional control of the promoter). Coding sequences can be operably-linked to regulatory sequences in sense or antisense orientation.

[0067] “Expression” refers to the transcription and/or translation of an endogenous gene, ORF or portion thereof, or a transgene in plants. For example, in the case of antisense constructs, expression may refer to the transcription of the antisense DNA only. In addition, expression refers to the transcription and stable accumulation of sense (mRNA) or functional RNA. Expression may also refer to the production of protein.

[0068] “Specific expression” is the expression of gene products which is limited to one or a few plant tissues (spatial limitation) and/or to one or a few plant developmental stages (temporal limitation). It is acknowledged that hardly a true specificity exists: promoters seem to be preferably switch on in some tissues, while in other tissues there can be no or only little activity. This phenomenon is known as leaky expression. However, with specific expression in this invention is meant preferable expression in one or a few plant tissues.

[0069] The “expression pattern” of a promoter (with or without enhancer) is the pattern of expression levels which shows where in the plant and in what developmental stage transcription is initiated by said promoter. Expression patterns of a set of promoters are said to be complementary when the expression pattern of one promoter shows little overlap with the expression pattern of the other promoter. The level of expression of a promoter can be determined by measuring the ‘steady state’ concentration of a standard transcribed reporter mRNA. This measurement is indirect since the concentration of the reporter mRNA is dependent not only on its synthesis rate, but also on the rate with which the mRNA is degraded. Therefore, the steady state level is the product of synthesis rates and degradation rates.

[0070] The rate of degradation can however be considered to proceed at a fixed rate when the transcribed sequences are identical, and thus this value can serve as a measure of synthesis rates. When promoters are compared in this way techniques available to those skilled in the art are hybridization S1-RNAse analysis, northern blots and competitive RT-PCR. This list of techniques in no way represents all available techniques, but rather describes commonly used procedures used to analyze transcription activity and expression levels of mRNA.

[0071] The analysis of transcription start points in practically all promoters has revealed that there is usually no single base at which transcription starts, but rather a more or less clustered set of initiation sites, each of which accounts for some start points of the mRNA. Since this distribution varies from promoter to promoter the sequences of the reporter mRNA in each of the populations would differ from each other. Since each mRNA species is more or less prone to degradation, no single degradation rate can be expected for different reporter mRNAs. It has been shown for various eukaryotic promoter sequences that the sequence surrounding the initiation site (‘initiator’) plays an important role in determining the level of RNA expression directed by that specific promoter. This includes also part of the transcribed sequences. The direct fusion of promoter to reporter sequences would therefore lead to suboptimal levels of transcription.

[0072] A commonly used procedure to analyze expression patterns and levels is through determination of the ‘steady state’ level of protein accumulation in a cell. Commonly used candidates for the reporter gene, known to those skilled in the art are β-glucuronidase (GUS), chloramphenicol acetyl transferase (CAT) and proteins with fluorescent properties, such as green fluorescent protein (GFP) from Aequora victoria. In principle, however, many more proteins are suitable for this purpose, provided the protein does not interfere with essential plant functions. For quantification and determination of localization a number of tools are suited. Detection systems can readily be created or are available which are based on, e.g., immunochemical, enzymatic, fluorescent detection and quantification. Protein levels can be determined in plant tissue extracts or in intact tissue using in situ analysis of protein expression.

[0073] Generally, individual transformed lines with one chimeric promoter reporter construct will vary in their levels of expression of the reporter gene. Also frequently observed is the phenomenon that such transformants do not express any detectable product (RNA or protein). The variability in expression is commonly ascribed to ‘position effects’, although the molecular mechanisms underlying this inactivity are usually not clear.

[0074] “Overexpression” refers to the level of expression in transgenic cells or organisms that exceeds levels of expression in normal or untransformed (nontransgenic) cells or organisms.

[0075] “Antisense inhibition” refers to the production of antisense RNA transcripts capable of suppressing the expression of protein from an endogenous gene or a transgene.

[0076] “Gene silencing” refers to homology-dependent suppression of viral genes, transgenes, or endogenous nuclear genes. Gene silencing may be transcriptional, when the suppression is due to decreased transcription of the affected genes, or post-transcriptional, when the suppression is due to increased turnover (degradation) of RNA species homologous to the affected genes (English et al., 1996). Gene silencing includes virus-induced gene silencing (Ruiz et al. 1998).

[0077] The terms “heterologous DNA sequence,” “exogenous DNA segment” or “heterologous nucleic acid,” as used herein, each refer to a sequence that originates from a source foreign to the particular host cell or, if from the same source, is modified from its original form. Thus, a heterologous gene in a host cell includes a gene that is endogenous to the particular host cell but has been modified through, for example, the use of DNA shuffling. The terms also include no-naturally occurring multiple copies of a naturally occurring DNA sequence. Thus, the terms refer to a DNA segment that is foreign or heterologous to the cell, or homologous to the cell but in a position within the host cell nucleic acid in which the element is not ordinarily found. Exogenous DNA segments are expressed to yield exogenous polypeptides. A “homologous” DNA sequence is a DNA sequence that is naturally associated with a host cell into which it is introduced.

[0078] “Homologous to” in the context of nucleotide sequence identity refers to the similarity between the nucleotide sequence of two nucleic acid molecules or between the amino acid sequences of two protein molecules. As used herein, “homology” and “homologous” refer to an evaluation of the similarity between two sequences based on measurements of sequence identity adjusted for variables including gaps, insertions, frame shifts, conservative substitutions, and sequencing errors, as described below. Two nucleotide sequences or polypeptides are the to be “identical” if the sequence of nucleotides or amino acid residues, respectively, in the two sequences is the same when aligned for maximum correspondence as described below. The term “complementary to” is used herein to mean that the sequence can form a Watson-Crick base pair with a reference polynucleotide sequence. Complementary sequences can include nucleotides, such as inosine, that neither disrupt Watson-Crick base pairing nor contribute to the pairing. A “reverse complement” of a sequence corresponds to the complementary sequence, but in the opposite orientation of bases from 5′ to 3′, or to the complement of the primary sequence, if the primary sequence is in a reverse orientation of bases from 5′ to 3′.

[0079] Homology is evaluated using any of the variety of sequence comparison algorithms and programs known in the art. Such algorithms and programs include, but are by no means limited to, TBLASTN, BLASTP, FASTA, TFASTA, and CLUSTALW (Pearson and Lipman, Proc Natl Acad Sci (USA) 85:2444 (1988); Altschul et al., J. Mol Biol 215:403 (1990)). In a particularly preferred embodiment, protein and nucleic acid sequence homologies are evaluated using the Basic Local Aligment Search Tool (“BLAST”) which is well known in the art (Karlin and Altschul, Proc Natl Acad Sci USA 87:2264 (1990); Altschul et al. (1990) supra, Altschul et al., Nucleic Acids Res 25:3389 (1997)). In particular, five specific BLAST programs are used to perform the following task:
[0080] (1) BLASTP and BLAST3 compare an amino acid query sequence against a protein sequence database;
[0081] (2) BLASTN compares a nucleotide query sequence against a nucleotide sequence database;
[0082] (3) BLASTX compares the six-frame conceptual translation products of a query nucleotide sequence (both strands) against a protein sequence database;
[0083] (4) TBLASTN compares a query protein sequence against a nucleotide sequence database translated in all six reading frames (both strands); and
[0084] (5) TBLASTX compares the six-frame translations of a nucleotide query sequence against the six-frame translations of a nucleotide sequence database.
   The BLAST programs identify homologous sequences by identifying similar segments, which are referred to herein as “high-scoring segment pairs,” between a query amino or nucleic acid sequence and a test sequence which is preferably obtained from a protein or nucleic acid sequence database. High-scoring segment pairs are preferably identified (aligned) by means of a scoring matrix selected from the many scoring matrices known in the art. Preferably, the scoring matrix used is the BLOSUM62 matrix (Gonnet et al., Science 256:1443 (1992); Henikoff and Henikoff, Proteins 17:49 (1993)). Likewise, the PAM or PAM250 matrices may also be used (Schwartz and Dayhoff, In Atlas of protein Sequence and Structure, Dayhoff, ed., Natl Biomed. Res. Found., pp. 353-358 (1978)). The BLAST programs evaluate the statistical significance of all high-scoring segment pairs identified, and preferably selects those segments which satisfy a user-specified threshold of significance, such as a user-specified percent homology. Preferably, the statistical significance of a high-scoring segment pair is evaluated using the statistical significance formula of Karlin (Karlin and Altschul (1990) supra).

[0085] “Percentage of sequence identity” can be determined from alignments performed using algorithms known in the art. Alignment of nucleotide or polypeptide sequences for comparison may be conducted by the local homology algorithm of Smith and Waterman (Add APL Math 2:482 (1981)), by the homology alignment algorithm of Needleman and Wunsch (J. Mol Biol 48:443 (1970)), by the search for similarity method of Pearson and Lipman (Proc Natl Acad Sci USA 85:2444 (1988)), by computerized implementations of these algorithms (GAP, BESTFIT, BLAST, PASTA, and TFASTA in the Wisconsin Genetics Software Package, Genetics Computer Group), or by inspection. When two sequences have been identified for comparison, GAP and BESTFIT are preferably employed to determine their optimal alignment. Typically, the default values of 5.00 for gap weight and 0.30 for gap weight length are used. In a preferred embodiment, percenty identity is determined using the GAP program for global alignment using default parameters, using the version of GAP found in the GCG package (Wisconsin Package Version 10.1, Genetics Computer Group, 575 Science Dr., Madison, Wis.).

[0086] “Percentage of sequence identity” is determined by comparing two optimally aligned sequences over a comparison window, wherein the portion of the sequence in the comparison window may include additions or deletions, including for example gaps or overhangs, as compared to the reference sequence (which does not include additions or deletions) for optimal alignment of the two sequences. The percentage is calculated by determining the number of positions at which the identical nucleotide base or amino acid residue occurs in both sequences to yield the number of matched positions, dividing the number of matched positions by the total number of positions in the window of comparison and multiplying the result by 100 to yield the percentage of sequence identity.

[0087] In a broad sense, the term “substantially similar”, when used herein with respect to a nucleotide sequence, means a nucleotide sequence corresponding to a reference nucleotide sequence, wherein the corresponding sequence encodes a polypeptide having substantially the same structure as the polypeptide encoded by the reference nucleotide sequence. Desirably, the substantially similar nucleotide sequence encodes the polypeptide encoded by the reference nucleotide sequence. Preferably, “substantially similar” refers to nucleotide sequences having at least 50% sequence identity, preferably at least 60%, 70%, 80% or 85%, more preferably at least 90% or 95%, and even more preferably, at least 96%, 97% or 99% sequence identity compared to a reference sequence containing nucleotide sequences of Table 1, that encode a protein having at least 50% identity, more preferably at least 85% identity, yet still more preferably at least 90% identity to a region of sequence of a BIOPATH protein and/or an FPD, wherein the protein sequence comparisons are conducted using GAP analysis as described below. Also, “substantially similar” preferably also refers to nucleotide sequences having at least 50% identity, more preferably at least 80% identity, still more preferably 95% identity, yet still more preferably at least 99% identity, to a region of nucleotide sequence encoding a BIOPATH protein and/or an FPD, wherein the nucleotide sequence comparisons are conducted using GAP analysis as described below. The term “substantially similar” is specifically intended to include nucleotide sequences wherein the sequence has been modified to optimize expression in particular cells.

[0088] A polynucleotide including a nucleotide sequence “substantially similar” to the reference nucleotide sequence preferably hybridizes to a polynucleotide including the reference nucleotide sequence in 7% sodium dodecyl sulfate (SDS), 0.5 M NaPO₄, 1 mM EDTA at 50° C. with washing in 2×SSC, 0.1% SDS at 50° C., more desirably in 7% sodium dodecyl sulfate (SDS), 0.5 M NaPO₄, 1 mM EDTA at 50° C. with washing in 1×SSC, 0.1% SDS at 50° C., more desirably still in 7% sodium dodecyl sulfate (SDS), 0.5 M NaPO₄, 1 mM EDTA at 50° C. with washing in 0.5×SSC, 0.1% SDS at 50° C., preferably in 7% sodium dodecyl sulfate (SDS), 0.5 M NaPO₄, 1 mM EDTA at 50° C. with washing in 0.1×SSC, 0.1% SDS at 50° C., more preferably in 7% sodium dodecyl sulfate (SDS), 0.5 M NaPO₄, 1 mM EDTA at 50° C. with washing in 0.1×SSC, 0.1% SDS at 65° C.

[0089] The term “substantially similar”, when used herein with respect to a protein or polypeptide, means a protein or polypeptide corresponding to a reference protein, wherein the protein has substantially the same structure and function as the reference protein, where only changes in amino acids sequence that do not materially affect the polypeptide function occur. When used for a protein or an amino acid sequence the percentage of identity between the substantially similar and the reference protein or amino acid sequence desirably is preferably at least 30%, more preferably at least 40%, 50%, 60%, 70%, 80%, 85%, or 90%, still more preferably at least 95%, still more preferably at least 99% with every individual number falling within this range of at least 30% to at least 99% also being part of the invention, using default GAP analysis parameters with the University of Wisconsin GCG (version 10), SEQWEB application of GAP, based on the algorithm of Needleman and Wunsch (1970), supra. As used herein the term “polypeptide of the present invention,” or any similar term refers to an amino acid sequence encoded by a DNA molecule including a nucleotide sequence substantially similar to an AC sequence. Homologs of BIOPATH protein and/or FPDs include amino acid sequences that are at least 30% identical to BIOPATH protein and/or FPD sequences found in searchable databases, as measured using the parameters described above.

[0090] “Target gene” refers to a gene on the replicon that expresses the desired target coding sequence, functional RNA, or protein. The target gene is not essential for replicon replication. Additionally, target genes may comprise native non-viral genes inserted into a non-native organism, or chimeric genes, and will be under the control of suitable regulatory sequences. Thus, the regulatory sequences in the target gene may come from any source, including the virus. Target genes may include coding sequences that are either heterologous or homologous to the genes of a particular plant to be transformed. However, target genes do not include native viral genes. Typical target genes include, but are not limited to genes encoding a structural protein, a seed storage protein, a protein that conveys herbicide resistance, and a protein that conveys insect resistance. Proteins encoded by target genes are known as “foreign proteins”. The expression of a target gene in a plant will typically produce an altered plant trait.

[0091] The term “altered plant trait” means any phenotypic or genotypic change in a transgenic plant relative to the wild-type or nor-transgenic plant host.

[0092] “Chromosomally-integrated” refers to the integration of a foreign gene or DNA construct into the host DNA by covalent bonds. Where genes are not “chromosomally integrated” they may be “transiently expressed.” Transient expression of a gene refers to the expression of a gene that is not integrated into the host chromosome but functions independently, either as part of an autonomously replicating plasmid or expression cassette, for example, or as part of another biological system such as a virus.

[0093] The term “transformation” refers to the transfer of a nucleic acid fragment into the genome of a host cell, resulting in genetically stable inheritance. Host cells containing the transformed nucleic acid fragments are referred to as “trausgenic” cells, and organisms comprising transgenic cells are referred to as “transgenic organisms”. Examples of methods of transformation of plants and plant cells include Agrobacterium-mediated transformation (De Blaere et al., 1987) and particle bombardment technology (Klein et al. 1987; U.S. Pat. No. 4,945,050). Whole plants may be regenerated from transgenic cells by methods well known to the skilled artisan (see, for example, Fromm et al., 1990).

[0094] “Transformed,” “transgenic,” and “recombinant” refer to a host organism such as a bacterium or a plant into which a heterologous nucleic acid molecule has been introduced. The nucleic acid molecule can be stably integrated into the genome generally known in the art and are disclosed in Sambrook et al., 1989. See also Innis et al., 1995 and Gelfand, 1995; and Innis and Gelfand, 1999. Known methods of PCR include, but are not limited to, methods using paired primers, nested primers, single specific primers, degenerate primers, gene-specific primers, vector-specific primers, partially mismatched primers, and the like. For example, “transformed,” “transformant,” and “transgenic” plants or calli have been through the transformation process and contain a foreign gene integrated into their chromosome. The term “untransformed” refers to normal plants that have not been through the transformation process.

[0095] “Transiently transformed” refers to cells in which transgenes and foreign DNA have been introduced (for example, by such methods as Agrobacterium-mediated transformation or biolistic bombardment), but not selected for stable maintenance.

[0096] “Stably transformed” refers to cells that have been selected and regenerated on a selection media following transformation.

[0097] “Transient expression” refers to expression in cells in which a virus or a transgene is introduced by viral infection or by such methods as Agrobacterium-mediated transformation, electroporation, or biolistic bombardment, but not selected for its stable maintenance.

[0098] “Genetically stable” and “heritable” refer to chromosomally-integrated genetic elements that are stably maintained in the plant and stably inherited by progeny through successive generations.

[0099] “Primary transformant” and “T0 generation” refer to transgenic plants that are of the same genetic generation as the tissue which was initially transformed (i.e., not having gone through meiosis and fertilization since transformation).

[0100] “Secondary transformants” and the “T1, T2, T3, etc. generations” refer to transgenic plants derived from primary transformants through one or more meiotic and fertilization cycles. They may be derived by self-fertilization of primary or secondary transformants or crosses of primary or secondary transformants with other transformed or untransformed plants.

[0101] “Wild-type” refers to a virus or organism found in nature without any known mutation.

[0102] “Genome” refers to the complete genetic material of an organism.

[0103] The term “nucleic acid” refers to deoxyribonucleotides or ribonucleotides and polymers thereof in either single- or double-stranded form, composed of monomers (nucleotides) containing a sugar, phosphate and a base which is either a purine or pyrimidine. Unless specifically limited, the term encompasses nucleic acids containing known analogs of natural nucleotides which have similar binding properties as the reference nucleic acid and are metabolized in a manner similar to naturally occurring nucleotides. Unless otherwise indicated, a particular nucleic acid sequence also implicitly encompasses conservatively modified variants thereof (e.g., degenerate codon substitutions) and complementary sequences as well as the sequence explicitly indicated. Specifically, degenerate codon substitutions may be achieved by generating sequences in which the third position of one or more selected (or all) codons is substituted with mixed-base and/or deoxyinosine residues (Batzer et al., 1991; Ohtsuka et al., 1985; Rossolini et al. 1994). A “nucleic acid fragment” is a fraction of a given nucleic acid molecule. In higher plants, deoxyribonucleic acid (DNA) is the genetic material while ribonucleic acid (RNA) is involved in the transfer of information contained within DNA into proteins. The term “nucleotide sequence” refers to a polymer of DNA or RNA which can be single- or double-stranded, optionally containing synthetic, non-natural or altered nucleotide bases capable of incorporation into DNA or RNA polymers. The terms “nucleic acid” or “nucleic acid sequence” may also be used interchangeably with gene, cDNA, DNA and RNA encoded by a gene.

[0104] The invention encompasses isolated or substantially purified nucleic acid or protein compositions. In the context of the present invention, an “isolated” or “purified” DNA molecule or an “isolated” or “purified” polypeptide is a DNA molecule or polypeptide that, by the hand of man, exists apart from its native environment and is therefore not a product of nature. An isolated DNA molecule or polypeptide may exist in a purified form or may exist in a non native environment such as, for example, a transgenic host cell. For example, an “isolated” or “purified” nucleic acid molecule or protein, or biologically active portion thereof, is substantially free of other cellular material, or culture medium when produced by recombinant techniques, or substantially free of chemical precursors or other chemicals when chemically synthesized. Preferably, an “isolated” nucleic acid is free of sequences (preferably protein encoding sequences) that naturally flank the nucleic acid (i.e., sequences located at the 5′ and 3′ ends of the nucleic acid) in the genomic DNA of the organism from which the nucleic acid is derived. For example, in various embodiments, the isolated nucleic acid molecule can contain less than about 5 kb, 4 kb, 3 kb, 2 kb, 1 kb, 0.5 kb, or 0.1 kb of nucleotide sequences that naturally flank the nucleic acid molecule in genomic DNA of the cell from which the nucleic acid is derived. A protein that is substantially free of cellular material includes preparations of protein or polypeptide having less than about 30%, 20%, 10%, 5%, (by dry weight) of contaminating protein. When the protein of the invention, or biologically active portion thereof, is recombinantly produced, preferably culture medium represents less than about 30%, 20%, 10%, or 5% (by dry weight) of chemical precursors or non-protein of interest chemicals.

[0105] The nucleotide sequences of the invention include both the naturally occurring sequences as well as mutant (variant) forms. Such variants will continue to possess the desired activity, i.e., either promoter activity or the activity of the product encoded by the open reading frame of the non-variant nucleotide sequence.

[0106] Thus, by “variants” is intended substantially similar sequences. For nucleotide sequences comprising an open reading frame, variants include those sequences that, because of the degeneracy of the genetic code, encode the identical amino acid sequence of the native protein. Naturally occurring allelic variants such as these can be identified with the use of well-known molecular biology techniques, as, for example, with polymerase chain reaction (PCR) and hybridization techniques. Variant nucleotide sequences also include synthetically derived nucleotide sequences, such as those generated, for example, by using site-directed mutagenesis and for open reading frames, encode the native protein, as well as those that encode a polypeptide having amino acid substitutions relative to the native protein. Generally, nucleotide sequence variants of the invention will have at least 40, 50, 60, to 70%, e.g., preferably 71%, 72%, 73%, 74%, 75%, 76%, 77%, 78%, to 79%, generally at least 80%, e.g., 81%-84%, at least 85%, e.g., 86%, 87%, 88%, 89%, 90%, 91%, 92%, 93%, 94%, 95%, 96%, 97%, to 98% and 99% nucleotide sequence identity to the native (wild type or endogenous) nucleotide sequence.

[0107] “Conservatively modified variations” of a particular nucleic acid sequence refers to those nucleic acid sequences that encode identical or essentially identical amino acid sequences, or where the nucleic acid sequence does not encode an amino acid sequence, to essentially identical sequences. Because of the degeneracy of the genetic code, a large number of functionally identical nucleic acids encode any given polypeptide. For instance the codons CGT, CGC, CGA, CGG, AGA, and AGG all encode the amino acid arginine. Thus, at every position where an arginine is specified by a codon, the codon can be altered to any of the corresponding codons described without altering the encoded protein. Such nucleic acid variations are “silent variations” which are one species of “conservatively modified variations.” Every nucleic acid sequence described herein which encodes a polypeptide also describes every possible silent variation, except where otherwise noted. One of skill will recognize that each codon in a nucleic acid (except ATG, which is ordinarily the only codon for methionine) can be modified to yield a functionally identical molecule by standard techniques. Accordingly, each “silent variation” of a nucleic acid which encodes a polypeptide is implicit in each described sequence.

[0108] The nucleic acid molecules of the invention can be “optimized” for enhanced expression in plants of interest. See, for example, EPA 035472; WO 91/16432; Perlak et al., 1991; and Murray et al., 1989. In this manner, the open reading frames in genes or gene fragments can be synthesized utilizing plant-preferred codons. See, for example, Campbell and Gowri, 1990 for a discussion of host-preferred codon usage. Thus, the nucleotide sequences can be optimized for expression in any plant. It is recognized that all or any part of the gene sequence may be optimized or synthetic. That is, synthetic or partially optimized sequences may also be used. Variant nucleotide sequences and proteins also encompass sequences and protein derived from a mutagenic and recombinogenic procedure such as DNA shuffling. With such a procedure, one or more different coding sequences can be manipulated to create a new polypeptide possessing the desired properties. In this manner, libraries of recombinant polynucleotides are generated from a population of related sequence polynucleotides comprising sequence regions that have substantial sequence identity and can be homologously recombined in vitro or in vivo. Strategies for such DNA shuffling are known in the art. See, for example, Stemmer, 1994; Stemmer, 1994; Crameri et al., 1997; Moore et al., 1997; Zhang et al., 1997; Crameri et al., 1998; and U.S. Pat. Nos. 5,605,793 and 5,837,458.

[0109] By “variant” polypeptide is intended a polypeptide derived from the native protein by deletion (so-called truncation) or addition of one or more amino acids to the N-terminal and/or C-terminal end of the native protein; deletion or addition of one or more amino acids at one or more sites in the native protein; or substitution of one or more amino acids at one or more sites in the native protein. Such variants may result from, for example, genetic polymorphism or from human manipulation. Methods for such manipulations are generally known in the art.

[0110] Thus, the polypeptides may be altered in various ways including amino acid substitutions, deletions, truncations, and insertions. Methods for such manipulations are generally known in the art. For example, amino acid sequence variants of the polypeptides can be prepared by mutations in the DNA. Methods for mutagenesis and nucleotide sequence alterations are well known in the art. See, for example, Kunkel, 1985; Kunkel et al., 1987; U.S. Pat. No. 4,873,192; Walker and Gaastra, 1983 and the references cited therein. Guidance as to appropriate amino acid substitutions that do not affect biological activity of the protein of interest may be found in the model of Dayhoffet al. (1978). Conservative substitutions, such as exchanging one amino acid with another having similar properties, are preferred.

[0111] Individual substitutions deletions or additions that alter, add or delete a single amino acid or a small percentage of amino acids (typically less than 5%, more typically less than 1%) in an encoded sequence are “conservatively modified variations,” where the alterations result in the substitution of an amino acid with a chemically similar amino acid. Conservative substitution tables providing functionally similar amino acids are well known in the art. The following five groups each contain amino acids that are conservative substitutions for one another: Aliphatic: Glycine (G), Alanine (A), Valine (V), Leucine (L), Isoleucine (I); Aromatic: Phenylalanine (F), Tyrosine (Y), Tryptophan (W); Sulfur-containing: Methionine (M), Cysteine (C); Basic: Arginine I, Lysine (K), Histidine (H); Acidic: Aspartic acid (D), Glutamic acid (E), Asparagine (N), Glutamine (Q). See also, Creighton, 1984. In addition, individual substitutions, deletions or additions which alter, add or delete a single amino acid or a small percentage of amino acids in an encoded sequence are also “conservatively modified variations.”

[0112] “Expression cassette” as used herein means a DNA sequence capable of directing expression of a particular nucleotide sequence in an appropriate host cell, comprising a promoter operably linked to the nucleotide sequence of interest which is operably linked to termination signals. It also typically comprises sequences required for proper translation of the nucleotide sequence. The coding region usually codes for a protein of interest but may also code for a functional RNA of interest, for example antisense RNA or a nontranslated RNA, in the sense or antisense direction. The expression cassette comprising the nucleotide sequence of interest may be chimeric, meaning that at least one of its components is heterologous with respect to at least one of its other components. The expression cassette may also be one which is naturally occurring but has been obtained in a recombinant form useful for heterologous expression. The expression of the nucleotide sequence in the expression cassette may be under the control of a constitutive promoter or of an inducible promoter which initiates transcription only when the host cell is exposed to some particular external stimulus. In the case of a multicellular organism, the promoter can also be specific to a particular tissue or organ or stage of development.

[0113] “Vector” is defined to include, inter alia, any plasmid, cosmid, phage or Agrobacterium binary vector in double or single stranded linear or circular form which may or may not be self transmissible or mobilizable, and which can transform prokaryotic or eukaryotic host either by integration into the cellular genome or exist extrachromosomally (e.g. autonomous replicating plasmid with an origin of replication).

[0114] Specifically included are shuttle vectors by which is meant a DNA vehicle capable, naturally or by design, of replication in two different host organisms, which may be selected from actinomycetes and related species, bacteria and eukaryotic (e.g. higher plant, mammalian, yeast or fungal cells).

[0115] Preferably the nucleic acid in the vector is under the control of, and operably linked to, an appropriate promoter or other regulatory elements for transcription in a host cell such as a microbial, e.g. bacterial, or plant cell. The vector may be a bifunctional expression vector which functions in multiple hosts. In the case of genomic DNA, this may contain its own promoter or other regulatory elements and in the case of cDNA this may be under the control of an appropriate promoter or other regulatory elements for expression in the host cell.

[0116] “Cloning vectors” typically contain one or a small number of restriction endonuclease recognition sites at which foreign DNA sequences can be inserted in a determinable fashion without loss of essential biological function of the vector, as well as a marker gene that is suitable for use in the identification and selection of cells transformed with the cloning vector. Marker genes typically include genes that provide tetracycline resistance, hygromycin resistance or ampicillin resistance.

[0117] A “transgenic plant” is a plant having one or more plant cells that contain an expression vector.

[0118] “Plant tissue” includes differentiated and undifferentiated tissues or plants, including but not limited to roots, stems, shoots, leaves, pollen, seeds, tumor tissue and various forms of cells and culture such as single cells, protoplast, embryos, and callus tissue. The plant tissue may be in plants or in organ, tissue or cell culture.

[0119] The following terms are used to describe the sequence relationships between two or more nucleic acids or polynucleotides: (a) “reference sequence”, (b) “comparison window”, (c) “sequence identity”, (d) “percentage of sequence identity”, and (e) “substantial identity”.

[0120] (a) As used herein, “reference sequence” is a defined sequence used as a basis for sequence comparison. A reference sequence may be a subset or the entirety of a specified sequence; for example, as a segment of a full length cDNA or gene sequence, or the complete cDNA or gene sequence.

[0121] (b) As used herein, “comparison window” makes reference to a contiguous and specified segment of a polynucleotide sequence, wherein the polynucleotide sequence in the comparison window may comprise additions or deletions (i.e., gaps) compared to the reference sequence (which does not comprise additions or deletions) for optimal alignment of the two sequences. Generally, the comparison window is at least 20 contiguous nucleotides in length, and optionally can be 30, 40, 50, 100, or longer. Those of skill in the art understand that to avoid a high similarity to a reference sequence due to inclusion of gaps in the polynucleotide sequence a gap penalty is typically introduced and is subtracted from the number of matches.

[0122] Methods of alignment of sequences for comparison are well known in the art. Thus, the determination of percent identity between any two sequences can be accomplished using a mathematical algorithm. Preferred, nonlimiting examples of such mathematical algorithms are the algorithm of Myers and Miller, 1988; the local homology algorithm of Smith et al. 1981; the homology alignment algorithm of Needleman and Wunsch 1970; the search for-similarity-method of Pearson and Lipman 1988; the algorithm of Karlin and Altschul, 1990, modified as in Karlin and Altschul, 1993.

[0123] Computer implementations of these mathematical algorithms can be utilized for comparison of sequences to determine sequence identity. Such implementations include, but are not limited to: CLUSTAL in the PC/Gene program (available from Intelligenetics, Mountain View, Calif.); the ALIGN program (Version 2.0) and GAP, BESTFIT, BLAST, FASTA, and TFASTA in the Wisconsin Genetics Software Package, Version 8 (available from Genetics Computer Group (GCG), 575 Science Drive, Madison, Wis., USA). Alignments using these programs can be performed using the default parameters. The CLUSTAL program is well described by Higgins et al. 1988; Higgins et al. 1989; Corpet et al. 1988; Huang et al. 1992; and Pearson et al. 1994. The ALIGN program is based on the algorithm of Myers and Miller, supra. The BLAST programs of Altschul et al., 1990, are based on the algorithm of Karlin and Altschul supra.

[0124] Software for performing BLAST analyses is publicly available through the National Center for Biotechnology Information (http://www.ncbi.nlm.nih.gov/). This algorithm involves first identifying high scoring sequence pairs (HSPs) by identifying short words of length W in the query sequence, which either match or satisfy some positive-valued threshold score T when aligned with a word of the same length in a database sequence. T is referred to as the neighborhood word score threshold (Altschul et al., 1990). These initial neighborhood word hits act as seeds for initiating searches to find longer HSPs containing them. The word hits are then extended in both directions along each sequence for as far as the cumulative alignment score can be increased. Cumulative scores are calculated using, for nucleotide sequences, the parameters M (reward score for a pair of matching residues; always >0) and N (penalty score for mismatching residues; always <0). For amino acid sequences, a scoring matrix is used to calculate the cumulative score. Extension of the word hits in each direction are halted when the cumulative alignment score falls off by the quantity X from its maximum achieved value, the cumulative score goes to zero or below due to the accumulation of one or more negative-scoring residue alignments, or the end of either sequence is reached.

[0125] In addition to calculating percent sequence identity, the BLAST algorithm also performs a statistical analysis of the similarity between two sequences (see, e.g., Karlin & Altschul (1993). One measure of similarity provided by the BLAST algorithm is the smallest sum probability (P(N)), which provides an indication of the probability by which a match between two nucleotide or amino acid sequences would occur by chance. For example, a test nucleic acid sequence is considered similar to a reference sequence if the smallest sum probability in a comparison of the test nucleic acid sequence to the reference nucleic acid sequence is less than about 0.1, more preferably less than about 0.01, and most preferably less than about 0.001.

[0126] To obtain gapped alignments for comparison purposes, Gapped BLAST (in BLAST 2.0) can be utilized as described in Altschul et al. 1997. Alternatively, PSI-BLAST (in BLAST 2.0) can be used to perform an iterated search that detects distant relationships between molecules. See Altschul et al., supra. When utilizing BLAST, Gapped BLAST, PSI-BLAST, the default parameters of the respective programs (e.g. BLASTN for nucleotide sequences, BLASTX for proteins) can be used. The BLASTN program (for nucleotide sequences) uses as defaults a wordlength (W) of 11, an expectation (E) of 10, a cutoff of 100, M=5, Nc=−4, and a comparison of both strands. For amino acid sequences, the BLASTP program uses as defaults a wordlength (W) of 3, an expectation (E) of 10, and the BLOSUM62 scoring matrix (see Henikoff & Henikoff, 1989). See http://www.ncbi.nlm.nih.gov. Alignment may also be performed manually by inspection.

[0127] For purposes of the present invention, comparison of nucleotide sequences for determination of percent sequence identity to the promoter sequences disclosed herein is preferably made using the BlastN program (version 1.4.7 or later) with its default parameters or any equivalent program. By “equivalent program” is intended any sequence comparison program that, for any two sequences in question, generates an alignment having identical nucleotide or amino acid residue matches and an identical percent sequence identity when compared to the corresponding alignment generated by the preferred program.

[0128] (c) As used herein, “sequence identity” or “identity” in the context of two nucleic acid or polypeptide sequences makes reference to the residues in the two sequences that are the same when aligned for maximum correspondence over a specified comparison window. When percentage of sequence identity is used in reference to proteins it is recognized that residue positions which are not identical often differ by conservative amino acid substitutions, where amino acid residues are substituted for other amino acid residues with similar chemical properties (e.g., charge or hydrophobicity) and therefore do not change the functional properties of the molecule. When sequences differ in conservative substitutions, the percent sequence identity may be adjusted upwards to correct for the conservative nature of the substitution. Sequences that differ by such conservative substitutions are said to have “sequence similarity” or “similarity.” Means for making this adjustment are well known to those of skill in the art. Typically this involves scoring a conservative substitution as a partial rather than a full mismatch, thereby increasing the percentage sequence identity. Thus, for example, where an identical amino acid is given a score of 1 and a non-conservative substitution is given a score of zero, a conservative substitution is given a score between zero and 1. The scoring of conservative substitutions is calculated, e.g., as implemented in the program PC/GENE (Intelligenetics, Mountain View, Calif.).

[0129] (d) As used herein, “percentage of sequence identity” means the value determined by comparing two optimally aligned sequences over a comparison window, wherein the portion of the polynucleotide sequence in the comparison window may comprise additions or deletions (i.e., gaps) as compared to the reference sequence (which does not comprise additions or deletions) for optimal alignment of the two sequences. The percentage is calculated by determining the number of positions at which the identical nucleic acid base or amino acid residue occurs in both sequences to yield the number of matched positions, dividing the number of matched positions by the total number of positions in the window of comparison, and multiplying the result by 100 to yield the percentage of sequence identity.

[0130] (e)(i) The term “substantial identity” of polynucleotide sequences means that a polynucleotide comprises a sequence that has at least 70%, 71%, 72%, 73%, 74%, 75%, 76%, 77%, 78%, or 79%, preferably at least 80%, 81%, 82%, 83%, 84%, 85%, 86%, 87%, 88%, or 89%, more preferably at least 90%, 91%, 92%, 93%, or 94%, and most preferably at least 95%, 96%, 97%, 98%, or 99% sequence identity, compared to a reference sequence using one of the alignment programs described using standard parameters. One of skill in the art will recognize that these values can be appropriately adjusted to determine corresponding identity of proteins encoded by two nucleotide sequences by taking into account codon degeneracy, amino acid similarity, reading frame positioning, and the like. Substantial identity of amino acid sequences for these purposes normally means sequence identity of at least 70%, more preferably at least 80%, 90%, and most preferably at least 95%.

[0131] Another indication that nucleotide sequences are substantially identical is if two molecules hybridize to each other under stringent conditions (see below). Generally, stringent conditions are selected to be about 5° C. lower than the thermal melting point (Tₘ) for the specific sequence at a defined ionic strength and pH. However, stringent conditions encompass temperatures in the range of about 1° C. to about 20° C., depending upon the desired degree of stringency as otherwise qualified herein. Nucleic acids that do not hybridize to each other under stringent conditions are still substantially identical if the polypeptides they encode are substantially identical. This may occur, e.g., when a copy of a nucleic acid is created using the maximum codon degeneracy permitted by the genetic code. One indication that two nucleic acid sequences are substantially identical is when the polypeptide encoded by the first nucleic acid is immunologically cross reactive with the polypeptide encoded by the second nucleic acid.

[0132] (e)(ii) The term “substantial identity” in the context of a peptide indicates that a peptide comprises a sequence with at least 70%, 71%, 72%, 73%, 74%, 75%, 76%, 77%, 78%, or 79%, preferably 80%, 81%, 82%, 83%, 84%, 85%, 86%, 87%, 88%, or 89%, more preferably at least 90%, 91%, 92%, 93%, or 94%, or even more preferably, 95%, 96%, 97%, 98% or 99%, sequence identity to the reference sequence over a specified comparison window. Preferably, optimal alignment is conducted using the homology alignment algorithm of Needleman and Wunsch (1970). An indication that two peptide sequences are substantially identical is that one peptide is immunologically reactive with antibodies raised against the second peptide. Thus, a peptide is substantially identical to a second peptide, for example, where the two peptides differ only by a conservative substitution.

[0133] For sequence comparison, typically one sequence acts as a reference sequence to which test sequences are compared. When using a sequence comparison algorithm, test and reference sequences are input into a computer, subsequence coordinates are designated if necessary, and sequence algorithm program parameters are designated. The sequence comparison algorithm then calculates the percent sequence identity for the test sequence(s) relative to the reference sequence, based on the designated program parameters.

[0134] As noted above, another indication that two nucleic acid sequences are substantially identical is that the two molecules hybridize to each other under stringent conditions. The phrase “hybridizing specifically to” refers to the binding, duplexing, or hybridizing of a molecule only to a particular nucleotide sequence under stringent conditions when that sequence is present in a complex mixture (e.g., total cellular) DNA or RNA. “Bind(s) substantially” refers to complementary hybridization between a probe nucleic acid and a target nucleic acid and embraces minor mismatches that can be accommodated by reducing the stringency of the hybridization media to achieve the desired detection of the target nucleic acid sequence.

[0135] “Stringent hybridization conditions” and “stringent hybridization wash conditions” in the context of nucleic acid hybridization experiments such as Southern and Northern hybridization are sequence dependent, and are different under different environmental parameters. The Tₘ is the temperature (under defined ionic strength and pH) at which 50% of the target sequence hybridizes to a perfectly matched probe. Specificity is typically the function of post-hybridization washes, the critical factors being the ionic strength and temperature of the final wash solution. For DNA-DNA hybrids, the Tₘ can be approximated from the equation of Meinkoth and Wahl, 1984; Tₘ 81.5° C.+16.6 (log M)+0.41 (% GC)−0.61 (% form)−500/L; where M is the molarity of monovalent cations, % GC is the percentage of guanosine and cytosine nucleotides in the DNA, % form is the percentage of formamide in the hybridization solution, and L is the length of the hybrid in base pairs. Tₘ is reduced by about 1° C. for each 1% of mismatching; thus, Tₘ, hybridization, and/or wash conditions can be adjusted to hybridize to sequences of the desired identity. For example, if sequences with >90% identity are sought, the Tₘ can be decreased 10° C. Generally, stringent conditions are selected to be about 5° C. lower than the thermal melting point I for the specific sequence and its complement at a defined ionic strength and pH. However, severely stringent conditions can utilize a hybridization and/or wash at 1, 2, 3, or 4° C. lower than the thermal melting point I; moderately stringent conditions can utilize a hybridization and/or wash at 6, 7, 8, 9, or 10° C. lower than the thermal melting point I; low stringency conditions can utilize a hybridization and/or wash at 11, 12, 13, 14, 15, or 20° C. lower than the thermal melting point 1. Using the equation, hybridization and wash compositions, and desired T, those of ordinary skill will understand that variations in the stringency of hybridization and/or wash solutions are inherently described. If the desired degree of mismatching results in a T of less than 45° C. (aqueous solution) or 32° C. (formamide solution), it is preferred to increase the SSC concentration so that a higher temperature can be used. An extensive guide to the hybridization of nucleic acids is found in Tijssen, 1993. Generally, highly stringent hybridization and wash conditions are selected to be about 5° C. lower than the thermal melting point Tₘ for the specific sequence at a defined ionic strength and pH.

[0136] An example of highly stringent wash conditions is 0.15 M NaCl at 72° C. for about 15 minutes. An example of stringent wash conditions is a 0.2×SSC wash at 65° C. for 15 minutes (see, Sambrook, infra, for a description of SSC buffer). Often, a high stringency wash is preceded by a low stringency wash to remove background probe signal. An example medium stringency wash for a duplex of, e.g., more than 100 nucleotides, is 1×SSC at 45° C. for 15 minutes. An example low stringency wash for a duplex of, e.g., more than 100 nucleotides, is 4-6×SSC at 40° C. for 15 minutes. For short probes (e.g., about 10 to 50 nucleotides), stringent conditions typically involve salt concentrations of less than about 1.5 M, more preferably about 0.01 to 1.0 M, Na ion concentration (or other salts) at pH 7.0 to 8.3, and the temperature is typically at least about 30° C. and at least about 60° C. for long robes (e.g., >50 nucleotides). Stringent conditions may also be achieved with the addition of destabilizing agents such as formamide. In general, a signal to noise ratio of 2× (or higher) than that observed for an unrelated probe in the particular hybridization assay indicates detection of a specific hybridization. Nucleic acids that do not hybridize to each other under stringent conditions are still substantially identical if the proteins that they encode are substantially identical. This occurs, e.g., when a copy of a nucleic acid is created using the maximum codon degeneracy permitted by the genetic code.

[0137] Very stringent conditions are selected to be equal to the Tₘ for a particular probe. An example of stringent conditions for hybridization of complementary nucleic acids which have more than 100 complementary residues on a filter in a Southern or Northern blot is 50% formamide, e.g., hybridization in 50% formamide, 1 M NaCl, 1% SDS at 37° C., and a wash in 0.1×SSC at 60 to 65° C. Exemplary low stringency conditions include hybridization with a buffer solution of 30 to 35% formamide, 1 M NaCl, 1% SDS (sodium dodecyl sulphate) at 37° C., and a wash in 1× to 2×SSC (20×SSC=3.0 M NaCl/0.3 M trisodium citrate) at 50 to 55° C. Exemplary moderate stringency conditions include hybridization in 40 to 45% formamide, 1.0 M NaCl, 1% SDS at 37° C., and a wash in 0.5× to 1×SSC at 55 to 60° C.

[0138] The following are examples of sets of hybridization/wash conditions that may be used to clone orthologous nucleotide sequences that are substantially identical to reference nucleotide sequences of the present invention: a reference nucleotide sequence preferably hybridizes to the reference nucleotide sequence in 7% sodium dodecyl sulfate (SDS), 0.5 M NaPO₄, 1 mM EDTA at 50° C. with washing in 2×SSC, 0.1% SDS at 50° C., more desirably in 7% A sodium dodecyl sulfate (SDS), 0.5 M NaPO₄, 1 mM EDTA at 50° C. with washing in 1×SSC, 0.1% SDS at 50° C., more desirably still in 7% sodium dodecyl sulfate (SDS), 0.5 M NaPO₄, 1 mM EDTA at 50° C. with washing in 0.5×SSC, 0.1% SDS at 50° C., preferably in 7% sodium dodecyl sulfate (SDS), 0.5 M NaPO₄, 1 mM EDTA at 50° C. with washing in 0.1×SSC, 0.1% SDS at 50° C., more preferably in 7% sodium dodecyl sulfate (SDS), 0.5 M NaPO₄, 1 mM EDTA at 50° C. with washing in 0.1×SSC, 0.1% SDS at 65° C.

[0139] “DNA shuffling” is a method to introduce mutations or rearrangements, preferably randomly, in a DNA molecule or to generate exchanges of DNA sequences between two or more DNA molecules, preferably randomly. The DNA molecule resulting from DNA shuffling is a shuffled DNA molecule that is a non-naturally occurring DNA molecule derived from at least one template DNA molecule. The shuffled DNA preferably encodes a variant polypeptide modified with respect to the polypeptide encoded by the template DNA, and may have an altered biological activity with respect to the polypeptide encoded by the template DNA.

[0140] “Recombinant DNA molecule” is a combination of DNA sequences that are joined together using recombinant DNA technology and procedures used to join together DNA sequences as described, for example, in Sambrook et al., 1989.

[0141] The word “plant” refers to any plant, particularly to seed plant, and “plant cell” is a structural and physiological unit of the plant, which comprises a cell wall but may also refer to a protoplast. The plant cell may be in form of an isolated single cell or a cultured cell, or as a part of higher organized unit such as, for example, a plant tissue, or a plant organ.

[0142] “Significant increase” is an increase that is larger than the margin of error inherent in the measurement technique, preferably an increase by about 2-fold or greater.

[0143] “Significantly less” means that the decrease is larger than the margin of error inherent in the measurement technique, preferably a decrease by about 2-fold or greater.

[0144] Within the scope of the present invention a set of nucleic acid molecules is provided which comprises polynucleotides relating to genes which are shown to be preferentially up-regulated and to share a similar expression pattern during the process of grain filling. The polynucleotides within this subgroup are useful tools for generating plants which produce grain with modified compositional characteristics leading to improved nutritional properties.

[0145] In one embodiment, the present invention thus relates to an isolated nucleic acid molecule comprising a nucleotide sequence encoding a polypeptide the expression of which is up-regulated during grain filling and the use of said molecule for modifying the nutritional composition and quality of the plant grain.

[0146] The majority of the polynucleotides within this group encode protein products that are directly involved in or associated with three major pathways of nutrition partitioning: the synthesis and transport of (1) carbohydrates, (2) proteins, and (3) fatty acids.

[0147] Carbohydrates are the most abundant organic molecules in nature and modulation of their synthesis, accumulation, and storage presents a vast template of possibilities for improving the quality and quantity of agricultural plants, food crops, consumer health products such as dietary supplements, and many industrial applications. In plants, carbohydrates occur as mono-, di, or polysaccharides and have the essential functions of providing the plant with chemical energy and structural stability. Although sugar uptake from external sources generally is not a relevant process, the redistribution of sugar (usually glucose) from photosynthesizing tissues to non-green cells is of major importance. Once translocated to terminal sink storage tissues, sugars are converted to starch and stored in the leucoplasts of seeds, fruits, tubers and roots, as well as actively growing photosynthetic tissues. These plant tissues provide the bulk of human dietary intake, and as such, the anabolic pathways of synthesis and assimilation (starch, fatty acids, and nitrogen) are of particular importance to agriculture and commercial industry.

[0148] As major contributors to the global carbon cycle, plants and algae bind 100 billion metric tons of carbon into carbohydrates each year. Nucleotide sequences encoding at least one polypeptide involved in sugar and carbohydrate metabolism and their end products, as well as the polypeptides encoded thereby, or an antigene sequences thereof, are commercially useful materials that can be used to study these processes and to modify these processes to elicit desired modifications in the compositional and nutritional characteristics of the plant grain.

[0149] In particular, the subset of nucleic acid molecules provided herein, which comprises polynucleotides relating to genes that are up-regulated during grain filling and involved in carbohydrate transport, synthesis, metabolism, or degradation is a valuable tool box from which an appropriate nucleic acid molecule can be chosen for modifying the quantity and quality of the carbohydrate and sugar content of the grain, respectively. This can be achieved by introducing and overexpressing at least one polynucleotide from the various subsets of nucleic acid molecules provided herein in the plant, but preferentially in the approproate tissues of the plant grain such as, for example, the plant endosperm or by reducing the expression level of the corresponding endogenous gene by methods known in the art including antisense and dsRNAi techniques.

[0150] It is thus one of the major objectives of the present invention to identify and provide a subset of nucleic acid molecules comprising at least one polynucleotide which encodes a protein that is involved in the metabolism of carbohydrates during grain filling. By modifying the expression level of at least one of the polynucleotides from this subgroup in a plant, but preferably in the approproate tissues of the plant grain such as, for example, the plant endosperm, and even more preferably at an early stage in seed development, it is possible to modify the carbohydrate composition of the plant grain accordingly.

[0151] In one embodiment, the invention thus relates to a polynucleotide comprising a nucleotide sequence encoding a polypeptide the activity of which is involved in or associated with the synthesis, metabolism or degradation of carbohydrates in the plant grain and the expression of which is up-regulated during grain filling, which nucleotide sequence is substantially similar to a sequence encoding a polypeptide as given in the SEQ ID NOs of table 7 such as SEQ ID NOs: 70-210.

[0152] In particular, the invention relates to polynucleotide comprising a nucleotide sequence encoding a polypeptide the activity of which is involved in or associated with the synthesis, metabolism or degradation of carbohydrates in the plant grain and the expression of which is up-regulated during grain filling, and which is substantially similar, and preferably has at least between 70%, and 99% amino acid sequence identity to at least one polypeptide of SEQ ID NOs given in table 7 such as SEQ ID NOs: 70-210, with any individual number within this range of between 70% and 99% A also being part of the invention.

[0153] The invention further relates to polynucleotide comprising a nucleotide sequence encoding a polypeptide the activity of which is involved in or associated with the synthesis, metabolism or degradation of carbohydrates in the plant grain and the expression of which is up-regulated during grain filling, and which is immunologically reactive with antibodies raised against a polypeptide as given in the SEQ ID NOs of table 7 such as SEQ ID NOs: 70-210.

[0154] More particularly, the invention relates to polynucleotide comprising a nucleotide sequence
[0155] a) as given in any one of SEQ ID NOs of table 7 such as SEQ ID NOs: 69-209 or a part thereof which still encodes a partial length polypeptide having substantially the same activity as the full-length polypeptide, e.g., at least 50%, more preferably at least 80%, even more preferably at least 90% to 95% the activity of the full-length polypeptide;
[0156] b) having substantial similarity to (a);
[0157] c) capable of hybridizing to (a) or the complement thereof;
[0158] d) capable of hybridizing to a nucleic acid comprising 50 to 200 or more consecutive nucleotides of a nucleotide sequence given in SEQ ID NOs of table 7 such as SEQ ID NOs: 69-209 or the complement thereof;
[0159] e) complementary to (a), (b) or (c); and
[0160] f) which is the reverse complement of (a), (b) or (c).

[0161] One of the defining questions in assimilate partitioning is understanding how plants regulate the allocation of photosynthate between competing sink organs. In addition to the number of competing organs, and the sink strength of each, exogenous factors such as abiotic stress or pathogen infection may also influence partitioning (Bush, Current Opinions in Plant Biology 2:187. (1999)).

[0162] Within the present invention a subset of genes could be identified that are known to be involved in the plant's response to abiotic and/or biotic stresses and demonstrated to be up-regulated during grain filling. By providing these genes it is now possible to regulate the expression levels of the encoded protein products in the plant grain during the grain filling process by applying methods known in the art including overexpressing or down-regulating the nucleic acid molecule in a plant, or preferably a plant seed, thereby modifying the partitioning in the developing grain.

[0163] In one aspect, the present invention relates to polynucleotide comprising a nucleotide sequence encoding a polypeptide the expression of which is up-regulated during grain filling and the activity of which is involved in or associated with the plant's response to abiotic and/or biotic stresses, which nucleotide sequence is substantially similar to a sequencen encoding a polypeptide as given in any one of the SEQ ID NOs of table 4 such as SEQ ID NOs: 2-18.

[0164] In particular, the invention relates to a polynucleotide comprising a nucleotide sequence encoding a polypeptide the expression of which is up-regulated during grain filling and the activity of which is involved in or associated with the plant's response to abiotic and/or biotic stresses, and which is substantially similar, and preferably has at least between 70%, and 99% amino acid sequence identity to at least one polypeptide as given in any one of the SEQ ID NOs of table 4 such as SEQ ID NOs: 2-18, with any individual number within this range of between 70% and 99% also being part of the invention.

[0165] The invention further relates to a polynucleotide comprising a nucleotide sequence encoding a polypeptide the expression of which is up-regulated during grain filling and the activity of which is involved in or associated with the plant's response to abiotic and/or biotic stresses, and which is immunologically reactive with antibodies raised against a polypeptide as given in any one of the SEQ ID NOs of table 4 such as SEQ ID NOs: 2-18.

[0166] More particularly, the invention relates to a polynucleotide comprising a nucleotide sequence
[0167] a) as given in in any one of the SEQ ID NOs of table 4 such as SEQ ID NOs: 1-17 or a part thereof which still encodes a partial length polypeptide having substantially the same activity as the full-length polypeptide, e.g., at least 50%, more preferably at least 80%, even more preferably at least 90% to 95% the activity of the full-length polypeptide;
[0168] b) having substantial similarity to (a);
[0169] c) capable of hybridizing to (a) or the complement thereof;
[0170] d) capable of hybridizing to a nucleic acid comprising 50 to 200 or more consecutive nucleotides of a nucleotide sequence as given in any one of the SEQ ID NOs of table 4 such as SEQ ID NOs 1-17 or the complement thereof;
[0171] e) complementary to (a), (b) or (c); and
[0172] f) which is the reverse complement of (a), (b) or (c).

[0173] The regulation of source-sink pathways encompasses complex mechanisms that integrate the expression of enzymes involved in carbohydrate production in source tissue with those involved with utilization in sink tissue. The elucidation of the underlying signal transduction pathways of sink-source regulation is of critical importance to the genetic manipulation of source-sink relations in transgenic plants.

[0174] Within the scope of the present invention a subset of genes was identified comprising genes that are up-regulated during grain filling and encode polypeptides with a kinase or phosphatase activity which are known to be involved in signal transduction pathways.

[0175] In a specific embodiment, the present invention provides nucleic acid molecules such as those represented in SEQ ID NOs: 19-29 that encode enzymes which exhibit a kinase or phosphatase activity and/or are involved in a signalig pathway and are thus key to the ability of regulating utilization of carbon/sugar sources, and partitioning of assimilates between source and sink tissues.

[0176] The invention thus relates to a polynucleotide comprising a nucleotide sequence encoding a polypeptide which exhibits a kinase or phosphatase activity and/or are involved in a signal transduction pathway, the expression of which is up-regulated during grain filling, which nucleotide sequence is substantially similar to a sequence encoding a polypeptide as given in any one of the SEQ ID NOs of table 5 such as SEQ ID Nos: 20-30.

[0177] More specifically, the invention relates to a polynucleotide comprising a nucleotide sequence encoding a polypeptide which exhibit a kinase or phosphatase activity and is up-regulated during grain filling and has at least between 70%, and 99% amino acid sequence identity to at least one polypeptide as given in any one of the SEQ ID NOs of table 5 such as SEQ ID NOs: 20-30, with any individual number within this range of between 70% and 99% also being part of the invention.

[0178] The invention further relates to a polynucleotide comprising a nucleotide sequence encoding a polypeptide which exhibit a kinase or phosphatase activity and is up-regulated during gain filling and immunologically reactive with antibodies raised against a polypeptide as given in any one of the SEQ ID NOs of table 5 such as SEQ ID NOs: 20-30.

[0179] More particularly, the invention relates to a polynucleotide comprising a nucleotide sequence
[0180] a) as given in any one of the SEQ ID NOs of table 5 such as SEQ ID NOs: 19-29 or a part thereof which still encodes a partial length polypeptide having substantially the same activity as the full-length polypeptide, e.g., at least 50%, more preferably at least 80%, even more preferably at least 90% to 95% the activity of the full-length polypeptide;
[0181] b) having substantial similarity to (a);
[0182] c) capable of hybridizing to (a) or the complement thereof,
[0183] d) capable of hybridizing to a nucleic acid comprising 50 to 200 or more consecutive nucleotides of a nucleotide sequence as given in any one of the SEQ ID NOs of table 5 such as SEQ ID NOs: 19-29 or the complement thereof,
[0184] e) complementary to (a), (b) or (c); and
[0185] f) which is the reverse complement of (a), (b) or (c).

[0186] Regulating the environment-induced carbon status in crop plants, particularly the partitioning in storage organs, provides industry with the ability to limit or expand growing seasons to better suit commercial markets, to enhance the quality and content of food products derived from storage organs or other tissue specific components of crop plants, and modulate many other metabolic pathways in plants (such as nitrogen assimilation, phosphorylation and the activation of regulatory proteins) that effect consumer end use.

[0187] Another possibility for modifying the carbohydrate content of the grain is through regulation of the transport of sugars and carbohydrates during grain filling.

[0188] Supplying carbohydrates to sink tissues via apoplastic mechanisms involves the release of sucrose into the apoplast by an exporter, cleavage by an extracellular invertase, and uptake of hexose monomers by monosaccharide transporters.

[0189] In one specific embodiment the present invention thus relates to a polynucleotide comprising a nucleotide sequence encoding a polypeptide with an activity which is involved in or associated with sugar transport and up-regulated during grain filling, which nucleotide sequence is substantially similar to a sequence encoding a polypeptide as given in any one of the SEQ ID NOs of table 6 such as SEQ ID NOs: 36; 50, and 58.

[0190] In particular, the invention relates to a polynucleotide comprising a nucleotide sequence encoding a polypeptide with an activity which is involved in or associated with sugar transport and up-regulated during grain filling and is substantially similar, and preferably has at least between 70%, and 99% amino acid sequence identity to at least one polypeptide as given in any one of the SEQ ID NOs of table 6 such as SEQ ID NOs: 36; 50, and 58, with any individual number within this range of between 70% and 99% also being part of the invention.

[0191] The invention further relates to a polynucleotide comprising a nucleotide sequence encoding a polypeptide with an activity which is involved in or associated with sugar transport and up-regulated during grain filling and is immunologically reactive with antibodies raised against a polypeptide as given in any one of the SEQ ID NOs of table 6 such as SEQ ID NOs: 36; 50, and 58.

[0192] More particularly, the invention relates to a polynucleotide comprising a nucleotide sequence
[0193] a) as given in any one of the SEQ ID NOs of table 6 such as SEQ ID NOs: 35; 49, and 57 or a pail thereof which still encodes a partial-length polypeptide having substantially the same activity as the full-length polypeptide, e.g., at least 50%, more preferably at least 80%, even more preferably at least 90% to 95% the activity of the full-length polypeptide;
[0194] b) having substantial similarity to (a);
[0195] c) capable of hybridizing to (a) or the complement thereof;
[0196] d) capable of hybridizing to a nucleic acid comprising 50 to 200 or more consecutive nucleotides of a nucleotide sequence as given in any one of the SEQ ID NOs of table 6 such as SEQ ID NOs: 35; 49, and 57 or the complement thereof;
[0197] e) complementary to (a), (b) or (c); and
[0198] f) which is the reverse complement of (a), (b) or (c).

[0199] Transmembrane transport of sugars has been demonstrated by the presence of transporter genes for a few crop species (spinach, potato). For the uses and application of modifying sugar transport mechanisms with regard to controlling the timing and extent of grain fill durations, we incorporate all relevant sections of PCT Publication WO9953068 to Allen et al., and for uses and application of modifying cells or plastids involved in hexose carrier proteins we incorporate all relevant sections of PCT Publication WO9953082 to Allen et al.

[0200] Glucosyl equivalents for starch biosynthesis are found within the scope of the present invention to be transported into the plastid (amyloplast) either as glucose-1-phosphate via a hexose-phosphate-Pi transporter (a representative example of which is given in SEQ ID NO: 35), as triose phosphates via a triose-phosphate-Pi translocator (a representative example of which are given in SEQ ID NO: 163), as phosphoenolpyruvate via a PEP-Pi translocator (SEQ ID NOs: 175), or as ADP-glucose via a Brittle-like adenylate translocator or via an oxoglutarate/malate transporter. One isoform of a triose-phosphate/phosphate translocator (SEQ ID NO: 163) is expressed to a slightly higher level during earlier stages of grain development.

[0201] Pyruvate appears to play a more important role during early stages of grain development in that a gene encoding an isoform of a PEP-Pi translocator (SEQ ID NO: 175) is relatively more highly expressed at this stage. In maize endosperm, the majority of glucosyl moieties are transported to the amyloplast during the linear phase of starch accumulation as ADP-glucose (J. C. Shannon et al., Plant Physiol. 117, 1235 (1998)).

[0202] For uses and application of modifying amyloplasts in the regulation of starch production via an ADP glucose transporter, we incorporate all relevant sections of PCT Publication WO9947681 to Emes et al.

[0203] Further examples of genes encoding a sugar transporter are provided in SEQ ID NOs: 35; 49, and 57. By providing the nucleic acid molecules according to the invention encoding sugar transporters the expression of which is upregulated during grain filling such as those given in SEQ ID NOs: 36; 50, and 58; 36385; 53483; it is now possible to manipulate the translocation and storage of sugars and their carbohydrate end products in the plant grain.

[0204] In still another embodiment the present invention provides further subset of nucleic acid molecules which are up-regulated during grain filling comprising a nucleotide sequence encoding a polypeptide that has a transmembrane domain and assists in the transport of amino acids and inorganic compounds including nitrate and various cations, which nucleotide sequence is substantially similar to a sequence encoding a polypeptide as given in SEQ ID NOs: 32; 38; 40; 42; 44; 46; 48; 52; 54; 56; 60; 62; 64, 66; and 68.

[0205] In particular, the invention relates to a polynucleotide comprising a nucleotide sequence encoding a polypeptide, that has a transmembrane domain and assists in the transport of amino acids and inorganic compounds including nitrate and various cations and is up-regulated during grain filling and is substantially similar, and preferably has at least between 70%, and 99% amino acid sequence identity to at least one polypeptide of SEQ ID NOs: 32; 38; 40; 42; 44; 46; 48; 52; 54; 56; 60; 62; 64, 66; and 68, with any individual number within this range of between 70% and 99% also being part of the invention.

[0206] The invention further relates to a polynucleotide comprising a nucleotide sequence encoding a polypeptide, that has a transmembrane domain and assists in the transport of amino acids and inorganic compounds including nitrate and various cations and is up-regulated during grain filling and is immunologically reactive with antibodies raised against a polypeptide of SEQ ID NOs: 32; 38; 40; 42; 44; 46; 48; 52; 54; 56; 60; 62; 64, 66; and 68.

[0207] More particularly, the invention relates to a polynucleotide comprising a nucleotide sequence
[0208] a) as given in any one of SEQ ID NOs: 31; 37; 39; 41; 43; 45; 47; 51; 53; 55; 59; 612; 63, 65; and 67 or a part thereof which still encodes a partial-length polypeptide having substantially the same activity as the full-length polypeptide, e.g., at least 50%, more preferably at least 80%, even more preferably at least 90% to 95% the activity of the full-length polypeptide;
[0209] b) having substantial similarity to (a);
[0210] c) capable of hybridizing to (a) or the complement thereof;
[0211] d) capable of hybridizing to a nucleic acid comprising 50 to 200 or more consecutive nucleotides of a nucleotide sequence given in SEQ ID NO: 31; 37; 39; 41; 43; 45; 47; 51; 53; 55; 59; 612; 63, 65; and 67, or the complement thereof;
[0212] e) complementary to (a), (b) or (c); and

[0213] f) which is the reverse complement of (a), (b) or (c).

[0214] In particular, the invention provides a nucleic acid molecule which is up-regulated during grain filling and comprises a nucleotide sequence encoding a polypeptide that belongs to the POT or PTR family.

[0215] Proteins of the POT family (also called the PTR (peptide transport) family) consists of proteins from animals, plants, yeast, archaea, and both Gram-negative and Gram-positive bacteria. Several of these organisms possess multiple POT family paralogues. The proteins are of about 450-600 amino acyl residues in length with the eukaryotic proteins in general being longer than the bacterial proteins. They exhibit 12 putative or established transmembrane ?-helical spanners. Some members of the POT family exhibit limited sequence similarity to protein members of the major facilitator superfamily (MFS; TC #2.A.1). (Comparison scores of up to 8 standard deviations for segments in excess of 60 residues in length.) Thus the POT family is probably a family within the MFS.

[0216] While most members of the POT family catalyze peptide transport, one is a nitrate permease and one can transport histidine as well as peptides. Some of the peptide transporters can also transport antibiotics. They function by proton symport, but the substrate:H⁺ stoichiometry is variable: the high affinity rat PepT2 carrier catalyzes uptake of 2 and 3H⁺ with neutral and anionic dipeptides, respectively, while the low affinity PepT1 carrier catalyzes uptake of one H+ per neutral peptide. In eukaryotes, some of these transporters may be in organellar membranes such as the lysosomes.

[0217] The generalized transport reaction catalyzed by the proteins of the POT family is:
substrate (out)+nH⁺(out)--->substrate (in)+nH⁺(in).

[0218] In a specific embodiment, the present invention relates to an isolated nucleic acid molecule which is up-regulated during grain filling and comprises a nucleotide sequence encoding a polypeptide that belongs to the POT or PTR family, which nucleotide sequence is substantially similar to a sequence encoding a polypeptide as given in SEQ ID NOs: 38; 52, and 68.

[0219] In particular, the invention relates to an isolated nucleic acid molecule comprising a nucleotide sequence encoding a polypeptide, which belongs to the POT or PTR family and up-regulated during grain filling and is substantially similar, and preferably has at least between 70%, and 99% amino acid sequence identity to at least one polypeptide of SEQ ID NOs: 38; 52, and 68, with any individual number within this range of between 70% and 99% also being part of the invention.

[0220] The invention further relates to an isolated nucleic acid molecule comprising a nucleotide sequence encoding a polypeptide, which belongs to the POT or PTR family and up-regulated during grain filling and is immunologically reactive with antibodies raised against a polypeptide of SEQ ID NOs: 38; 52, and 68.

[0221] More particularly, the invention relates to an isolated nucleic acid molecule comprising a nucleotide sequence
[0222] a) as given in any one of SEQ ID NOs: 37; 51, and 67 or a part thereof which still encodes a partial-length polypeptide having substantially the same activity as the full-length polypeptide, e.g., at least 50%, more preferably at least 80%, even more preferably at least 90% to 95% the activity of the full-length polypeptide;
[0223] b) having substantial similarity to (a);
[0224] c) capable of hybridizing to (a) or the complement thereof;
[0225] d) capable of hybridizing to a nucleic acid comprising 50 to 200 or more consecutive nucleotides of a nucleotide sequence given in SEQ ID NO: 37; 51, and 67 or the complement thereof;
[0226] e) complementary to (a), (b) or (c); and
[0227] f) which is the reverse complement of (a), (b) or (c).

[0228] One of the economically most important and valuable carbohydrate end products is starch, which is an essential component of many food, feed, and industrial products. It consists of two types of glucan polymers: relatively long chained polymers with few branches known as amylose, and shorter chained but highly branched molecules called amylopectin.

[0229] Its biosynthesis depends on the complex interaction of multiple enzymes (Smith, A. et al., (1995) Plant Physio. 107:673-677; Preiss, J., (1988) Biochemistry of Plants 14:181-253). One of the key enzymes in starch biosynthesis is ADP-glucose pyrophosphorylase, which catalyzes the formation of ADP-glucose; a series of starch synthases which use ADP glucose as a substrate for polymer formation using alpha.-1-4 linkages; and several starch branching enzymes, which modify the polymer by transferring segments of polymer to other parts of the polymer using alpha.-1-6 linkages, creating branched structures. However, based on data from starch forming plants such as potato, and corn, it is becoming clear that other enzymes also play a role in the determination of the final structure of starch. In particular, debranching and disproportionating enzymes not only participate in starch degradation, but also in modification of starch structure during its biosynthesis. Different models for this action have been proposed, but all share the concept that such activities, or lack thereof, change the structure of the starch produced.

[0230] In plants used typically for the production of starch, such as maize or potato, the synthesized starch consists of approximately 25% amylose-starch and of about 75% amylopectin-starch.

[0231] With respect to the homogeneity of the basic component starch for its use in the industrial area, starch-producing plants are needed which contain, for example, only the component amylopectin or only the component amylose. For a number of other uses plants are needed that synthesize amylopectin types with different degrees of branchings.

[0232] Such plants may for example be obtained by breeding or by means of mutagenesis techniques. It is known for various plant species, such as for maize, that by means of mutagenesis varieties may be produced in which only amylopectin is formed. Also in the case of potato a genotype was produced from a haploid line by means of chemical mutagenesis. Said genotype does not form amylose (Hovenkamp-Hermelink, Theor. Appl. Genet. 75 (1987), 217-221).

[0233] Apart from conventional breeding and mutagenesis techniques, recombinant DNA techniques are now increasingly used in order to specifically interfere with the starch metabolism of starch storing plants. A prerequisite for this is that DNA sequences be provided which encode enzymes involved in the starch metabolism.

[0234] The present invention now provides a subset of nucleic acid molecules that are involved in the starch biosynthesis pathway and were shown to be up-regulated during grain filling. Representative examples of those subset genes are provided in SEQ ID NOs: 69-187 of the Sequence Listing.

[0235] In a particular embodiment, the present invention relates to a polynucleotide comprising a nucleotide sequence encoding a polypeptide which is involved in associated with starch biosynthsis and up-regulated during grain filling, which nucleic acid molecule is substantially similar to a nucleic acid encoding a polypeptide as given in any one of the SEQ ID NOs of table 7 such as SEQ ID NOs: 70-188.

[0236] More specifically, the invention relates to a polynucleotide comprising a nucleotide sequence encoding a polypeptide, which is involved in or associated with starch biosynthesis and up-regulated during grain filling and is substantially similar, and preferably has at least between 70%, and 99% amino acid sequence identity to at least one polypeptide as given in any one of the SEQ ID NOs of table 7 such as SEQ ID NOs: 70-188, with any individual number within this range of between 70% and 99% also being part of the invention.

[0237] The invention further relates to a polynucleotide comprising a nucleotide sequence encoding a polypeptide, which is involved in or associated with starch biosynthesis and up-regulated during grain filling and is immunologically reactive with antibodies raised against a polypeptide as given in any one of the SEQ ID NOs of table 7 such as SEQ ID NOs: 70-188.

[0238] More particularly, the invention relates to a polynucleotide comprising a nucleotide sequence
[0239] a) as given in any one of the SEQ ID NOs of table 7 such as SEQ ID NOs: 69-187 or a part thereof which still encodes a partial-length polypeptide having substantially the same activity as the full-length polypeptide, e.g., at least 50%, more preferably at least 80%, even more preferably at least 90% to 95% the activity of the fill-length polypeptide;
[0240] b) having substantial similarity to (a);
[0241] c) capable of hybridizing to (a) or the complement thereof;
[0242] d) capable of hybridizing to a nucleic acid comprising 50 to 200 or more consecutive nucleotides of a nucleotide sequence as given in any one of the SEQ ID NOs of table 7 such as SEQ ID NOs: 69-187, or the complement thereof,
[0243] e) complementary to (a), (b) or (c); and
[0244] f) which is the reverse complement of (a), (b) or (c).

[0245] By providing a subset of genes encoding polypeptides that are involved in starch metabolism it is now possible to interfere with starch metabolism to produce starch with modified physico/chemical characteristics.

[0246] A gene encoding the small subunit of ADPG pyrophosphorylase (SEQ ID NO: 138); is expressed at early stages of grain development in conjunction with a single gene encoding a large subunit (SEQ ID NO: 140). Three other large subunits (SEQ ID NOs: 136; 142); are up-regulated at a later stage in development from 4 days after anthesis, in conjunction with the up regulation of the starch synthase genes (SEQ ID NOs: 129; 131; and 133) and two genes for branching enzymes (SEQ ID NOs: 70; and 72) (involved in amylose and amylopectin biosynthesis, respectively). Only one (distinct from the two mentioned above) of the small subunit genes increases in this time period. The expression of different isoforms may be related to the shift to storage starch production and a postulated concomitant shift to cytoplasmic ADP-glucose production (Stark, D. M., et al., “Regulation of the Amount of Starch in Plant Tissues by ADP Glucose Pyrophosphorylase”, Science, 258,287-291 (Oct. 9, 1992)).

[0247] In one embodiment the present invention provides a nucleic acid molecule comprising a nucleotide sequence which encodes a small subunit of ADPG pyrophosphorylase. In another embodiment the invention provides a nucleic acid molecule comprising a nucleotide sequence which encodes a large subunit of ADPG pyrophosphorylase.

[0248] In particular, the invention relates to a polynucleotide comprising a nucleotide sequence encoding a polypeptide with an activity of a small and large subunit ADPG pyrophosphorylase, respectively, which nucleotide sequence is substantially similar to a nucleic acid sequence encoding a polypeptide as given in SEQ ID NOs: 136-142.

[0249] More specifically, the invention relates to a polynucleotide comprising a nucleotide sequence encoding a polypeptide with an activity of a small and large subunit ADPG pyrophosphorylase, respectively, which is up-regulated during grain filling and has at least between 70%, and 99% amino acid sequence identity to at least one polypeptide of SEQ ID NOs: 136-142, with any individual number within this range of between 70% and 99% also being part of the invention.

[0250] The invention further relates to a polynucleotide comprising a nucleotide sequence encoding a polypeptide with an activity of a small and large subunit ADPG pyrophosphorylase, respectively, which is up-regulated during grain and immunologically reactive with antibodies raised against a polypeptide of SEQ ID NOs: 136-142.

[0251] More particularly, the invention relates to a polynucleotide comprising a nucleotide sequence
[0252] a) as given in any one of SEQ ID NOs: SEQ ID NOs: 135-141 or a part thereof which still encodes a partial-length polypeptide having substantially the same activity as the full-length polypeptide, e.g., at least 50%, more preferably at least 80%, even more preferably at least 90% to 95% the activity of the full-length polypeptide;
[0253] b) having substantial similarity to (a);
[0254] c) capable of hybridizing to (a) or the complement thereof;
[0255] d) capable of hybridizing to a nucleic acid comprising 50 to 200 or more consecutive nucleotides of nucleotides given in SEQ ID NO: SEQ ID NOs: 135-141, or the complement thereof;
[0256] e) complementary to (a), (b) or (c); and
[0257] f) which is the reverse complement of (a), (b) or (c).

[0258] The nucleic acid molecules of the instant invention may be used to create transgenic plants in which the small and/or large subunits of ADPG pyrophosphorylase are present at higher or lower levels than normal or in cell types or developmental stages in which it is not normally found. This may have the effect of altering starch structure in those cells or tissues but especially in the developing grain.

[0259] For a further targeted modification of the starch in plants, in particular of the degree of branching of starch synthesized in plants by means of recombinant DNA techniques, it is still necessary to identify DNA sequences that encode enzymes participating in the starch metabolism, particularly in the branching of starch molecules.

[0260] In the case of potato, for example, DNA sequences have by now been described which encode a granule-bound starch synthase or a branching enzyme (Q enzyme), and they have been used in order to genetically modify plants.

[0261] Apart from the Q enzymes that introduce branchings into starch molecules, enzymes occur in plants which are capable of dissolving branchings. These enzymes are called debranching enzymes.

[0262] In the case of sugar beet, Li et al. (Plant Physiol. 98 (1992), 1277-1284) could only prove the occurrence of one debranching enzyme, apart from five endo- and two exoamylases. This enzyme having a size of approximately 100 kD and an optimum pH value of 5.5 is located within the chloroplasts. A debranching enzyme was also described for spinach. The debranching enzyme from spinach as well as that from sugar beet exhibit a fivefold lower activity in a reaction with amylopectin as substrate when compared to a reaction with pullulan as a substrate (Ludwig et al., Plant Physiol. 74 (1984), 856-861; Li et al., Plant Physiol. 98 (1992), 1277-1284). The isolation of a cDNA encoding a debranching enzyme was described for spinach (Renz et al., Plant Physiol. 108 (1995), 1342).

[0263] The existence of a debranching enzyme for maize has been described in the prior art. The corresponding mutant was designated su (sugary). The gene of the sugary locus was cloned recently (see James et al., Plant Cell 7 (1995), 417-429). In the case of the agriculturally significant starch storing cultured plant potato, the activity of a debranching enzyme was examined by Hobson et al. (J. Chem. Soc., (1951), 1451). It was proven that the respective enzyme, contrary to the Q enzyme, does not exhibit any activities leading to an elongation of the polysaccharide chain, but merely hydrolyses .alpha.-1,6-glycosidic bonds.

[0264] Within the scope of the present invention a subset of genes is provided that encode polypeptides the activity of which is associated with the structural shaping of the starch granule. In particular, the invention provides a subset of genes that encode polypeptides the activity of which is associated the branching/debranching (representative examples of wich are given in SEQ ID NOs: 69-73/75; 77 (isoamylase debranching enzyme)) and/or degradation of starch (a-amylase (SEQ ID NO: 79-91), pullulanase (SEQ ID NO: 109) [the last gene in the a-amylase series], a-amylase inhibitor (SEQ ID NOs: 93-99); β-amylase (SEQ ID NO101-107), a-glucosidase (SEQ ID NO: 111-117). By modulating the expression of the polypeptides according to the invention, the amylose amylopectin ratio can be changed in order to accommodate the varying quality standards for food and/or feed applications or specific processing requirements. For example, by over-expressing and inhibiting the expression of endogeneous branching and/or debranching enzyme genes in rice or any other cereal crop plant, respectively, a plant can be produced that exhibits increased or reduced amounts of branching/debranching enzyme activity for the purpose of modifying the degree of branching of the amylopectin starch.

[0265] By inhibiting the expression of endogeneous branching and/or debranching enzyme genes, plants are produced that exhibit a reduced activity of these enzymes, which leads to the synthesis of a modified starch. Inhibition of branching/debranching gene expression can be achieved by applying method known in the art such as, for example, antisense or dsRNAi techniques. By applying these techniques it is possible to produce plants in which the expression of an endogeneous branching/debranching enzyme gene in rice or any other cereal crop plant is inhibited to different degrees within the range of 0.1% to 100%, which all individual numbers within this range also being part of the invention. This enables in particular the production of cereal plants synthesizing amylopectin starch with most various variations of the degree of branching. This constitutes an advantage with regard to conventional breeding and mutagenesis techniques in which a lot of time and costs are required in order to provide such a variety. Highly branched amylopectin has a particularly large surface and is therefore particularly suitable as a copolymer. A high degree of branching furthermore leads to an improvement of the amylopectin's solubility in water. This property is very advantageous for certain technical applications.

[0266] Another way of modifying the branching characteristics of starch is by overexpressing the nucleic acid molecule according to the invention encoding a branching/debranching enzyme activity in rice in a transgenic plant, but especially a plant seed.

[0267] The expression of a novel or additional branching/debranching enzyme activity from rice in the transgenic plant cells and plants of the invention influences the degree of branching of the amylopectin synthesized in the cells and plants. Therefore, a starch synthesized in these plants exhibits modified physical and/or chemical properties when compared to starch from wildtype plants.

[0268] Genes encoding products involved in starch structure rearrangement (debranching enzyme is (SEQ ID NO: 75-77 (isoamylase debranching enzyme)); branching enzyme (SEQ ID NOs: 69-73)) and starch degradation (a-amylase (SEQ ID NOs 79-91), a-amylase inhibitor (SEQ ID NOs: 93-99); pullulanase (SEQ ID NOs 109) [the last gene in the a-amylase series], β-amylase (SEQ ID NOs 101-107), a-glucosidase (SEQ ID NOs 111-117)) are all strongly expressed towards the end of grain development, reflecting their involvement in the final stages of shaping the starch granule. Genes encoding isoforms of an a-amylase inhibitor (SEQ ID NOs: 93 and 95) are expressed most strongly in the aleurone and seed coat layers, and endosperm and not (or to a reduced extent) in the embryo. The embryo also shows a different expression of genes encoding starch synthase and branching enzymes, perhaps reflecting its status as an energy-requiring sink organ rather than as a storage tissue. Myers et al. discuss the interaction of starch synthases, branching enzymes, debranching enzymes and disproportionating enzymes in producing and trimming glucan molecules so that a final transition may take place to a crystalline form (A. M. Myers, M. K. Morell, M. G. James, S. G. Ball. Plant Physiol. 122, 989 (2000)).

[0269] In a further embodiment, the present invention provides the ability to modulate the shape and the physico/chemical properties of the starch granule by modifying expression level and pattern of those genes that encode products involved in starch structure rearrangement such as, for example, SEQ ID NO: 75-77 (isoanylase debranching enzyme); branching enzyme (SEQ ID NOs: 69-73) and starch degradation (a-amylase (SEQ ID NOs 79-91)), a-amylase inhibitor (SEQ ID NOs: 93-99); pullulanase (SEQ ID NO: 109), β-amylase (SEQ ID NO: 101-107), and/or a-glucosidase (SEQ ID NO: 111-117).

[0270] The invention thus also relates to a polynucleotide comprising a nucleotide sequence encoding a polypeptide involved in starch structure rearrangement, which nucleic acid molecule is substantially similar to a nucleic acid encoding a polypeptide as given in the SEQ ID NOs of table 7 such as SEQ ID NOs: 75-77 exhibiting isoamylase debranching enzyme activity, 69-73 exhibiting a branching enzyme activity, 80-92 exhibiting an a-amylase activity; 94-100 exhibiting an a-amylase inhibitor activity; 110 exhibiting a pullulanase activity; 102-108, exhibiting a β-amylase activity; 112-118, exhibiting a a-glucosidase activity.

[0271] More specifically, the invention relates to a polynucleotide comprising a nucleotide sequence encoding a polypeptide which is involved in starch structure rearrangement and up-regulated during grain filling and has at least between 70%, and 99% amino acid sequence identity to at least one polypeptide as given in the SEQ ID NOs of table 7 such as SEQ ID NOs: 75-77 exhibiting isoamylase debranching enzyme activity, 69-73 exhibiting a branching enzyme activity, 80-92, 80-92 exhibiting an a-amylase activity; 94-100 exhibiting an a-amylase inhibitor activity; 110 exhibiting a pullulanase activity; 102-108, exhibiting a β-amylase activity; 112-118, exhibiting a a-glucosidase activity with any individual number within this range of between 70% and 99% also being part of the invention.

[0272] The invention further relates to a polynucleotide comprising a nucleotide sequence encoding a polypeptide which is involved in starch structure rearrangement and up-regulated during grain filling and immunologically reactive with antibodies raised against a polypeptide as given in the SEQ ID NOs of table 7 such as SEQ ID NOs: 75-77 exhibiting isoamylase debranching enzyme activity, 69-73 exhibiting a branching enzyme activity, 80-92, 80-92 exhibiting an a-amylase activity; 94-100 exhibiting an a-amylase inhibitor activity; 110 exhibiting a pullulanase activity; 102-108, exhibiting a β-amylase activity; 112-118, exhibiting a a-glucosidase activity.

[0273] More particularly, the invention relates to a polynucleotide comprising a nucleotide sequence
[0274] a) as given in the SEQ ID NOs of table 7 such as SEQ ID NOs: 75-77 exhibiting isoamylase debranching enzyme activity, 69-73 exhibiting a branching enzyme activity, 79-91 exhibiting an a-amylase activity; 93-99 exhibiting an a-amylase inhibitor activity; 109 exhibiting a pullulanase activity; 101-107, exhibiting a 6-amylase activity; 111-117, exhibiting a a-glucosidase activity or a part thereof which still encodes a partial-length polypeptide having substantially the same activity as the fill-length polypeptide, e.g., at least 50%, more preferably at least 80%, even more preferably at least 90% to 95% the activity of the full-length polypeptide;
[0275] b) having substantial similarity to (a);
[0276] c) capable of hybridizing to (a) or the complement thereof;
[0277] d) capable of hybridizing to a nucleic acid comprising 50 to 200 or more consecutive nucleotides of a nucleotide sequence given as given in the SEQ ID NOs of table 7 such as SEQ ID NOs: 75-77 exhibiting isoamylase debranching enzyme activity; 69-73 exhibiting a branching enzyme activity, 79-91 exhibiting an a-amylase activity; 93-99 exhibiting an a-amylase inhibitor activity; 109 exhibiting a pullulanase activity; 101-107, exhibiting a β-amylase activity; 111-117, exhibiting a a-glucosidase activity, or the complement thereof;
[0278] e) complementary to (a), (b) or (c); and
[0279] f) which is the reverse complement of (a), (b) or (c).

[0280] The identification of a defined subset of genes that are involved in carbohydrate metabolism but especially in starch metabolism and the expression of which is coordinately up- or down-regulated during the grain filling process makes it now possible to improve grain quality by overexpressing and/or underexpressing or completely knocking out genes that are known to positively contribute to the nutritional or processing properties of grains such as, for example, genes encoding products involved in starch structure rearrangement and starch degradation as mentioned hereinbefore.

[0281] The expression of a-amylase, which is central in the starch biosynthesis pathway, may further be modified to obtain plants producing a desirable content of reducing sugars. For, example, a high content of reducing sugar resulting from a high α-amylase activity is desirable when rice or other cereal plants are to be used for the production of alcohol. This can be achieved by modifying the expression of the plant endogenous genes encoding an α-amylase or α-amylase inhibitor activity, for example, by introducing and overexpressing in a target plant a nucleic acid molecule comprising a nucleotide sequence that encodes a polypeptide the amino acid sequence of which is substantially similar to any one of those given in SEQ ID NOs: 80-92 exhibiting an a-amylase activity; and 94-100 exhibiting an a-amylase inhibitor activity.

[0282] In the specific embodiment, the invention thus also relates to a polynucleotide comprising a nucleotide sequence encoding a polypeptide exhibiting an amylase or an amylase inhibitor activity, which nucleic acid molecule is substantially similar to a nucleic acid encoding a polypeptide as given in the SEQ ID NOs of table 7 such as SEQ ID NOs: 80-92 exhibiting an a-amylase activity; and 94-100 exhibiting an a-amylase inhibitor activity.

[0283] More specifically, the invention relates to a polynucleotide comprising a nucleotide sequence encoding a polypeptide which has an activity of an amylase and is up-regulated during grain filling and has at least between 70%, and 99% amino acid sequence identity to at least one polypeptide as given in the SEQ ID NOs of table 7 such as SEQ ID NOs: 80-92 exhibiting an a-amylase activity; and 94-100 exhibiting an a-amylase inhibitor activity, with any individual number within this range of between 70% and 99% also being part of the invention.

[0284] The invention further relates to a polynucleotide comprising a nucleotide sequence encoding a polypeptide which which has an activity of an amylase and is up-regulated during grain filling and immunologically reactive with antibodies raised against a polypeptide as given in the SEQ ID NOs of table 7 such as SEQ ID NOs: 80-92 exhibiting an a-amylase activity; and 94-100 exhibiting an a-amylase inhibitor activity.

[0285] More particularly, the invention relates to a polynucleotide comprising a nucleotide sequence
[0286] a) as given in the SEQ ID NOs of table 7 such as SEQ ID NOs: 79-91 exhibiting an a-amylase activity; and 93-99 exhibiting an a-amylase inhibitor activity or a part thereof which still encodes a partial length polypeptide having substantially the same activity as the full-length polypeptide, e.g., at least 50%, more preferably at least 80%, even more preferably at least 90% to 95% the activity of the full-length polypeptide;
[0287] b) having substantial similarity to (a);
[0288] c) capable of hybridizing to (a) or the complement thereof;
[0289] d) capable of hybridizing to a nucleic acid comprising 50 to 200 or more consecutive nucleotides of a nucleotide sequence as given in the SEQ ID NOs of table 7 such as SEQ ID NOs: 79-91 exhibiting an a-amylase activity; and 93-99 exhibiting an a-amylase inhibitor activity or the complement thereof;
[0290] e) complementary to (a), (b) or (c); and
[0291] f) which is the reverse complement of (a), (b) or (c).

[0292] Different isoforms often show distinct spatial expression patterns. For example, three different sucrose synthase isoforms (SEQ ID NOs: 119-123) are expressed in developing grain tissue, two of which (SEQ ID NOs: 121 and 123) are expressed more highly at the start of grain development (0 days post anthesis) and one (SEQ ID NO: 119) which is up-regulated towards the end of grain development. The spatial distribution of each differs. Other isoforms (SEQ ID NOs: 125 and 127), showing low expression in the grain, are expressed strongly in stems or roots.

[0293] The invention thus also relates to a polynucleotide comprising a nucleotide sequence encoding a polypeptide exhibiting a sucrose synthase activity, which nucleic acid molecule is substantially similar to a nucleic acid encoding a polypeptide as given in SEQ ID NOs: 120-128.

[0294] More specifically, the invention relates to a polynucleotide comprising a nucleotide sequence encoding a polypeptide which has an activity of an sucrose synthase and is up-regulated during grain filling and has at least between 70%, and 99% amino acid sequence identity to at least one polypeptide of SEQ ID NOs: 120-128, with any individual number within this range of between 70% and 99% also being part of the invention.

[0295] The invention further relates to a polynucleotide comprising a nucleotide sequence encoding a polypeptide which which has an activity of a sucrose synthase and is up-regulated during grain filling and immunologically reactive with antibodies raised against a polypeptide of SEQ ID NOs: 120-128.

[0296] More particularly, the invention relates to a polynucleotide comprising a nucleotide sequence
[0297] a) as given in any one of SEQ ID NOs: 119-127 or a part thereof which still encodes a partial-length polypeptide having substantially the same activity as the full-length polypeptide, e.g., at least 50%, more preferably at least 80%, even more preferably at least 90% to 95% the activity of the full-length polypeptide;
[0298] b) having substantial similarity to (a);
[0299] c) capable of hybridizing to (a) or the complement thereof;
[0300] d) capable of hybridizing to a nucleic acid comprising 50 to 200 or more consecutive nucleotides of a nucleotide sequence given in SEQ ID NOs: 119-127 or the complement thereof,
[0301] e) complementary to (a), (b) or (c); and
[0302] f) which is the reverse complement of (a), (b) or (c).

[0303] In a further embodiment, the present invention provides the ability to regulate glucanases (as represented by SEQ ID NO: 191). Glucanases can be used to minimize wet droppings in high wheat, or barley, poultry and swine diets by breaking down and reducing the viscosity of β-glucans and other non-starch polysaccharides and thus can provide benefit as a processing aid in animal feed. For uses and application of modifying crop plants by creating transgenic monocots and monocot seeds expressing rice β-glucanase enzymes and genes we incorporate all relevant section of PCT Publication WO9859046 to Rodriguez.

[0304] The invention thus also relates to a polynucleotide comprising a nucleotide sequence encoding a polypeptide exhibiting a glucanase activity, which nucleic acid molecule is substantially similar to a nucleic acid encoding a polypeptide as given in SEQ ID NOs: 192.

[0305] More specifically, the invention relates to a polynucleotide comprising a nucleotide sequence encoding a polypeptide which has an activity of an glucanase and is up-regulated during grain filling and has at least between 70%, and 99% amino acid sequence identity to at least one polypeptide of SEQ ID NOs: 192, with any individual number within this range of between 70% and 99% also being part of the invention.

[0306] The invention further relates to a polynucleotide comprising a nucleotide sequence encoding a polypeptide which which has an activity of a glucanase and is up-regulated during grain filling and immunologically reactive with antibodies raised against a polypeptide of SEQ ID NOs: 192.

[0307] More particularly, the invention relates to a polynucleotide comprising a nucleotide sequence
[0308] a) as given in SEQ ID NO: 191 or a part thereof which still encodes a partial length polypeptide having substantially the same activity as the full-length polypeptide, e.g., at least 50%, more preferably at least 80%, even more preferably at least 90% to 95% the activity of the full-length polypeptide;
[0309] b) having substantial similarity to (a);
[0310] c) capable of hybridizing to (a) or the complement thereof,
[0311] d) capable of hybridizing to a nucleic acid comprising 50 to 200 or more consecutive nucleotides of nucleotides given in SEQ ID NO: 191 or the complement thereof;
[0312] e) complementary to (a), (b) or (c); and
[0313] f) which is the reverse complement of (a), (b) or (c).

[0314] Thus, in an embodiment applicable to all of the above stated provisions, the present invention provides nucleotide sequences encoding at least one polypeptide involved in the synthesis, metabolism, transport or storage of carbohydrates, as well as any polypeptides encoded thereby, or any antigene sequences thereof, which have numerous applications using techniques that are known to those skilled in the art of molecular biology, biotechnology, biochemistry, genetics, physiology or pathology. These techniques include the use of nucleotide molecules as hybridization probes, for chromosome and gene mapping, in PCR technologies, in the production of sense or antisense nucleic acids, in screening for new therapeutic molecules, in production of plants and seeds having desirable, inheritable, commercially useful phenotypes, or in discovery of inhibitory compounds.

[0315] In a further collective embodiment, the present invention provides the ability to modulate carbohydrates, sugars and their transporters in plant tissues, by over-expressing, under-expressing or knocking out one or more cell cycle genes or their gene products, in a plant cell, in vitro or in planta. Expression vectors comprising at least one nucleotide sequence involved in carbohydrate or sugar synthesis, metabolism, transport or storage, or any antigenes thereof, operably linked to at least one suitable promoter and/or regulatory sequence can be used to study the role of polypeptides encoded by said sequences, for example by transforming a host cell with said expression vector and measuring the effects of overexpression and underexpression of sequences. A host cell transformed with at least one expression vector comprising nucleotide sequences involved in carbohydrate modulation, operably linked to suitable promoters and/or regulatory sequences, can be useful to produce a dietary supplement comprising a polypeptide having a defined amino acid profile.

[0316] In a further collective embodiment, the present invention provides a transformed plant host cell, or one obtained through breeding, capable of over-expressing, under-expressing, or having a knock out of said metabolic genes and/or their gene products.

[0317] Such a plant cell, transformed with at least one expression vector comprising nucleotide sequences involved in carbohydrate synthesis, metabolism, transport or storage, operably linked to suitable promoters and/or regulatory sequences, can be used to regenerate plant tissue or an entire plant, or seed there from, in which the effects of expression, including overexpression or underexpression, of the introduced sequence or sequences can be measured in vitro or in planta.

[0318] A further subset of genes provided herein comprises genes that encode polypeptides with an activity that is involved in or associated with the production of seed storage proteins.

[0319] In seeds of higher plants, proteins are contained in an amount of 20-30% by weight in case of beans, and in an amount of about 10% by weight in case of cereals, based on dry weight. Among the proteins in seeds, 70-80% by weight are storage proteins. Particularly, in rice seeds, about 80% by weight of the seed storage proteins is glutelin which is only soluble in dilute acids and dilute alkalis. The remainders are prolamin (10-15% by weight) soluble in organic solvents and globulin (5-10% by weight) solubilized by salts.

[0320] Seed storage proteins are important as a protein source in foods and feeds, so that they have been well studied from the view points of nutrition and protein chemistry. As a result, in cereals, storage protein genes of maize, wheat, barley and the like have been cloned, amino acid sequences of the proteins have been deduced from the nucleotide sequence, and regulatory regions of the genes have been analyzed.

[0321] The present invention provides a subset of nucleic acid molecules that is up-regulated during grain filling and comprises a nucleotide sequence encoding a seed storage protein. Representative examples of these genes are given in SEQ ID NOs: 211-249.

[0322] The invention thus also relates to a polynucleotide comprising a nucleotide sequence encoding a seed storage protein, which nucleic acid molecule is substantially similar to a nucleic acid encoding a polypeptide as given in any one of the SEQ ID NOs of table 8 such as SEQ ID NOs: 212-250.

[0323] More specifically, the invention relates to a polynucleotide comprising a nucleotide sequence encoding a seed storage protein which is up-regulated during grain filling and has at least between to 70%, and 99% amino acid sequence identity to at least one polypeptide as given in any one of the SEQ ID NOs of table 8 such as SEQ ID NOs: 212-250, with any individual number within this range of between 70% and 99% also being part of the invention.

[0324] The invention further relates to a polynucleotide comprising a nucleotide sequence encoding a seed storage protein, which is up-regulated during grain filling and immunologically reactive with antibodies raised against a polypeptide as given in any one of the SEQ ID NOs of table 8 such as SEQ ID NOs: 212-250.

[0325] More particularly, the invention relates to a polynucleotide comprising a nucleotide sequence
[0326] a) as given in any one of the SEQ ID NOs of table 8 such as SEQ ID NOs: 211-249 or a part thereof which still encodes a partial-length polypeptide having substantially the same activity as the full-length polypeptide, e.g., at least 50%, more preferably at least 80%, even more preferably at least 90% to 95% the activity of the full-length polypeptide;
[0327] b) having substantial similarity to (a);
[0328] c) capable of hybridizing to (a) or the complement thereof,
[0329] d) capable of hybridizing to a nucleic acid comprising 50 to 200 or more consecutive nucleotides of a nucleotide sequence as given in any one of the SEQ ID NOs of table 8 such as SEQ ID NOs: 211-249 or the complement thereof;
[0330] e) complementary to (a), (b) or (c); and
[0331] f) which is the reverse complement of (a), (b) or (c).

[0332] By providing the above subset of genes, the protein content and composition in the plant grain can be modified by up- or down-regulating the expression of at least one nucleic acid molecule within this subgroup giving rise to altered levels or an altered composition of seed storage protein in the plant grain.

[0333] For rice grains to be processed, it is advantageous that the protein content is small. In case of rice to be used for preparing fermented alcoholic beverage, this can be attained through well defined refinement measures, thereby removing the proteins in the peripheral portion of endosperm which contains large amounts of storage proteins. In producing rice starch, in order to promote the purity, proteins are removed by treatments with alkalis, surfactants and ultrasonication.

[0334] The protein content in the rice grain also influences the taste of rice. Good tasting rice grains have usually low contents of proteins. Rice varieties with a low protein content have been developed by the conventional cross-breeding or by mutation-breeding. (U.S. Pat. No. 5,516,668; Maruta).

[0335] U.S. Pat. No. 5,516,668 describes a method for decreasing the amount of glutelin in plant seeds, comprising introducing into a rice plant a gene which is a template for the transcription of an antisense RNA against rice glutelin; and transcribing said gene in seeds from said rice plant to inhibit translation of mRNA of glutelin, thereby decreasing the amount of glutelin in said seeds in comparison to the amount of glutelin contained in seeds from unmodified wild-type rice plants.

[0336] The cDNA of glutelin which is a seed storage protein in rice has been cloned and complete primary structure of the protein has been determined by sequencing the cDNA. The gene of this protein has been isolated by using the cDNA as a probe (Japanese Laid-open Patent Application (Kokai) No. 63-91085).

[0337] Rice plants with a low glutelin content in the rice grain can now be produced more efficiently by down-regulating two or more of the the endogenous glutelin genes in rice seeds such as those provided in SEQ ID NOs: 223, 235, and 239 using methods known in the art including antisense and dsRNAi techniques.

[0338] The invention thus also relates to a polynucleotide comprising a nucleotide sequence encoding a glutelin protein the expression of which is up-regulated during grain filling, which nucleic acid molecule is substantially similar to a nucleic acid encoding a polypeptide as given in SEQ ID NOs: 224, 236, and 240.

[0339] More specifically, the invention relates to a polynucleotide comprising a nucleotide sequence encoding a glutelin protein the expression of which is up-regulated during grain filling and which has at least between 70%, and 99% amino acid sequence identity to at least one polypeptide of SEQ ID NOs: 224, 236, and 240, with any individual number within this range of between 70% and 99% also being part of the invention.

[0340] The invention further relates to a polynucleotide comprising a nucleotide sequence encoding a seed glutelin protein, the expression of which is up-regulated during grain filling and which is immunologically reactive with antibodies raised against a polypeptide of SEQ ID NOs: 224, 236, and 240.

[0341] More particularly, the invention relates to a polynucleotide comprising a nucleotide sequence
[0342] a) as given in any one of SEQ ID NOs: 223,235, and 239 or a part thereof which still encodes a partial length polypeptide having substantially the same activity as the full-length polypeptide, e.g., at least 50%, more preferably at least 80%, even more preferably at least 90% to 95% the activity of the full-length polypeptide;
[0343] b) having substantial similarity to (a);
[0344] c) capable of hybridizing to (a) or the complement thereof;
[0345] d) capable of hybridizing to a nucleic acid comprising 50 to 200 or more consecutive nucleotides of a nucleotide sequence given in any one of SEQ ID NOs: 223, 235, and 239, or the complement thereof;
[0346] e) complementary to (a), (b) or (c); and
[0347] f) which is the reverse complement of (a), (b) or (c).

[0348] Another class of seed storage proteins are the prolamins, which are naturally rich in the essential amino acids lysine and methionine. Overexpressing said genes can thus increase the nutritional value of feeds and foods by producing said proteins at higher levels than those found in the unmodified wild-type plants. Another aspect of the present invention thus relates to providing genes that encode rice prolamin protein such as those given in SEQ ID NOs: 217, 219, 225 and 241.

[0349] The invention thus also relates to a polynucleotide comprising a nucleotide sequence encoding a prolamin protein the expression of which is up-regulated during grain filling, which nucleotide sequence is substantially similar to a nucleic acid sequence encoding a polypeptide as given in SEQ ID NOs: 218, 220, 226 and 242.

[0350] More specifically, the invention relates to a polynucleotide comprising a nucleotide sequence encoding a prolamin protein, the expression of which is up-regulated during grain filling and which has at least between 70%, and 99% amino acid sequence identity to at least one polypeptide of SEQ ID NOs: 218, 220, 226 and 242, with any individual number within this range of between 70% and 99% also being part of the invention.

[0351] The invention further relates to a polynucleotide comprising a nucleotide sequence encoding a prolamin protein, the expression of which is up-regulated during grain filling and which is immunologically reactive with antibodies raised against a polypeptide of SEQ ID NOs: 218, 220, 226 and 242.

[0352] More particularly, the invention relates to a polynucleotide comprising a nucleotide sequence
[0353] a) as given in any one of SEQ ID NOs: 217, 219, 225 and 241 or a part thereof which still encodes a partial-length polypeptide having substantially the same activity as the full-length polypeptide, e.g., at least 50%, more preferably at least 80%, even more preferably at least 90% to 95% the activity of the full-length polypeptide;
[0354] b) having substantial similarity to (a);
[0355] c) capable of hybridizing to (a) or the complement thereof;
[0356] d) capable of hybridizing to a nucleic acid comprising 50 to 200 or more consecutive nucleotides of a nucleotide sequence given in any one of SEQ ID NOs: 217, 219, 225 and 241, or the complement thereof;
[0357] e) complementary to (a), (b) or (c); and
[0358] f) which is the reverse complement of (a), (b) or (c).

[0359] Gliadins are a further group of seed storage proteins that are of economic importance. Gliadin is a single-chained protein having an average molecular weight of about 30,000-40,000, with an isoelectric of pH 4.0-5.0. Gliadin proteins are extremely sticky when hydrated and have little or no resistance to extension. Gliadin is responsible for giving gluten dough its characteristic cohesiveness. Gliadin is a premium products, when available.

[0360] Gliadin is known to improve the freeze-thaw stability of frozen dough and also improves microwave stability. This product is also used as an all-natural chewing gum base replacer, a pharmaceutical binder, and improves the texture and mouth feel of pasta products and has been found to improve cosmetic products.

[0361] The invention provides a further subset of genes comprising a nucleotide sequence that encodes gliadin storage proteins. By overexpressing said genes in the plant, but preferably in the plant seed, the plant produces grain with an increased concentration of gliadin as compared to the unmodified wild-type plant.

[0362] In a particular embodiment, the invention thus relates to a polynucleotide comprising a nucleotide sequence encoding a gliadin protein, the expression of which is up-regulated during grain filling, which nucleotide sequence is substantially similar to a nucleic acid sequence encoding a polypeptide as given in SEQ ID NOs: 212, 219; 234, 248; and 250.

[0363] More specifically, the invention relates to a polynucleotide comprising a nucleotide sequence encoding a gliadin protein, the expression of which is up-regulated during grain filling and which has at least between 70%, and 99% amino acid sequence identity to at least one polypeptide of SEQ ID NOs: 212, 219; 234, 248; and 250, with any individual number within this range of between 700/o and 99% also being part of the invention.

[0364] The invention further relates to a polynucleotide comprising a nucleotide sequence encoding a seed gliadin protein, the expression of which is up-regulated during grain filling and which is immunologically reactive with antibodies raised against a polypeptide of SEQ ID NOs: 212, 219; 234, 248; and 250.

[0365] More particularly, the invention relates to a polynucleotide comprising a nucleotide sequence
[0366] g) as given in any one of SEQ ID NOs: 211, 220; 233, 247; and 249 or a part thereof which still encodes a partial length polypeptide having substantially the same activity as the full-length polypeptide, e.g., at least 50%, more preferably at least 80%, even more preferably at least 90% to 95% the activity of the full-length polypeptide;
[0367] h) having substantial similarity to (a);
[0368] i) capable of hybridizing to (a) or the complement thereof;
[0369] j) capable of hybridizing to a nucleic acid comprising 50 to 200 or more consecutive nucleotides of a nucleotide sequence given in any one of SEQ ID NOs: 211, 220; 233, 247; and 249, or the complement thereof;
[0370] k) complementary to (a), (b) or (c); and
[0371] l) which is the reverse complement of (a), (b) or (c).

[0372] In a further embodiment the invention provides a subset of genes which encode polypeptides that are involved in or associated with the metabolism of fatty acids in the rice grain.

[0373] Seed oil content has traditionally been modified by plant breeding. The use of recombinant DNA technology to alter seed oil composition can accelerate this process and in some cases alter seed oils in a way that cannot be accomplished by breeding alone. The oil composition of Brassica has been significantly altered by modifying the expression of a number of lipid metabolism genes. Such manipulations of seed oil composition have focused on altering the proportion of endogenous component fatty acids. For example, antisense repression of the .DELTA.12-desaturase gene in transgenic rapeseed has resulted in an increase in oleic acid of up to 83%. (Topfer et al. 1995 Science 268:681-686).

[0374] There have been some successful attempts at modifying the composition of seed oil in transgenic plants by introducing new genes that allow the production of a fatty acid that the host plants were not previously capable of synthesizing. Van de Loo, et al. (1995 Proc. Natl. Acad. Sci USA 92:6743-6747) have been able to introduce a .DELTA.12-hydroxylase gene into transgenic tobacco, resulting in the introduction of a novel fatty acid, ricinoleic acid, into its seed oil. The reported accumulation was modest from plants carrying constructs in which transcription of the hydroxylase gene was under the control of the cauliflower mosaic virus (CaMV) 35S promoter. Similarly, tobacco plants have been engineered to produce low levels of petroselinic acid by expression of an acyl-ACP desaturase from coriander (Cahoon et al. 1992 Proc. Natl. Acad. Sci USA 89:11184-11188).

[0375] The long chain fatty acids (C18 and larger), have significant economic value both as nutritionally and medically important foods and as industrial commodities (Ohlrogge, J. B. 1994 Plant Physiol. 104:821-826). Linoleic (18:2.DELTA.9,12) and alpha.-linolenic acid (18:3 .DELTA.9,12,15) are essential fatty acids found in many seed oils. The levels of these fatty-acids have been manipulated in oil seed crops through breeding and biotechnology (Ohlrogge, et al. 1991 Biochim. Biophys. Acta 1082:1-26; Topfer et al. 1995 Science 268:681-686). Additionally, the production of novel fatty acids in seed oils can be of considerable use in both human health and industrial applications.

[0376] Consumption of plant oils rich in .gamma.-linolenic acid (GLA) (18:3.DELTA.6,9,12) is thought to alleviate hypercholesterolemia and other related clinical disorders which correlate with susceptibility to coronary heart disease (Brenner R. R. 1976 Adv. Exp. Med. Biol. 83:85-101). The therapeutic benefits of dietary GLA may result from its role as a precursor to prostaglandin synthesis (Weete, J. D. 1980 in Lipid Biochemistry of Fungi and Other Organisms, eds. Plenum Press, New York, pp. 59-62). Linoleic acid(18:2) (LA) is transformed into gamma linolenic acid (18:3) (GLA) by the enzyme .DELTA.6-desaturase.

[0377] Few seed oils contain GLA despite high contents of the precursor linoleic acid. This is due to the absence of .DELTA.6-desaturase activity in most plants. For example, only borage (Borago officinalis), evening primrose (Oenothera biennis), and currants (Ribes nigrum) produce appreciable amounts of linolenic acid. Of these three species, only Oenothera and Borage are cultivated as a commercial source for GLA. It would be beneficial if agronomic seed oils could be engineered to produce GLA in significant quantities by introducing a heterologous .DELTA.6-desaturase gene. It would also be beneficial if other expression products associated with fatty acid synthesis and lipid metabolism could be produced in plants at high enough levels so that commercial production of a particular expression product becomes feasible.

[0378] As disclosed in U.S. Pat. No. 5,552,306, a cyanobacterial .DELTA.sup.6-desaturase gene has been recently isolated. Expression of this cyanobacterial gene in transgenic tobacco resulted in significant but low level GLA accumulation. (Reddy et al. 1996 Nature Biotech. 14:639-642).

[0379] The present invention now provides a subset of genes encoding polypeptides that are involved in or associated with fatty acid metabolism, the expression of which is up-regulated during grain filling.

[0380] In particular, the invention relates to a polynucleotide the expression of which is up-regulated during grain filling comprising a nucleotide sequence encoding a polypeptide that is involved in or associated with fatty acid synthesis or lipid metabolism, which nucleotide sequence is substantially similar to a nucleic acid sequence encoding a polypeptide as given in any one of the SEQ ID NOs of table 9 such as SEQ ID NOs: 252-280.

[0381] More specifically, the invention relates to a polynucleotide the expression of which is up-regulated during grain filling comprising a nucleotide sequence encoding a polypeptide that is involved in or associated with fatty acid synthesis or lipid metabolism and has at least between 70%, and 99% amino acid sequence identity to at least one polypeptide as given in any one of the SEQ ID NOs of table 9 such as SEQ ID NOs: 252-280, with any individual number within this range of between 70% and 99% also being part of the invention.

[0382] The invention further relates to a polynucleotide the expression of which is up-regulated during grain filling comprising a nucleotide sequence encoding a polypeptide that is involved in or associated with fatty acid synthesis or lipid metabolism and immunologically reactive with antibodies raised against a polypeptide as given in any one of the SEQ ID NOs of table 9 such as SEQ ID NOs: 252-280.

[0383] More particularly, the invention relates to a polynucleotide comprising a nucleotide sequence
[0384] a) as given in any one of the SEQ ID NOs of table 9 such as SEQ ID NOs: 251-279 or a part thereof which still encodes a partial-length polypeptide having substantially the same activity as the full-length polypeptide, e.g., at least 50%, more preferably at least 80%, even more preferably at least 90% to 95% the activity of the full-length polypeptide;
[0385] b) having substantial similarity to (a);
[0386] c) capable of hybridizing to (a) or the complement thereof;
[0387] d) capable of hybridizing to a nucleic acid comprising 50 to 200 or more consecutive nucleotides of nucleotides as given in any one of the SEQ ID NOs of table 9 such as SEQ ID NOs: 251-279 or the complement thereof,
[0388] e) complementary to (a), (b) or (c); and
[0389] f) which is the reverse complement of (a), (b) or (c).

[0390] By providing this subset of genes it is now possible to modify the level and composition of grain lipids by modulating the expression of those genes in the plant seed. Expression can be modulated either by introducing at least one of the nucleic acid molecules from this subset into the plant, preferably under control of a seed specific promoter, and overexpressing said at least one to nucleic acid molecule in the plant seed, or, by down-regulating expression of the corresponding endogenous gene applying techniques know in the art including anti sense and dsRNAi techniques.

[0391] In a specific embodiment, the invention relates to a subset of genes encoding oleosins as represented by SEQ ID NOs: 257 and 259.

[0392] Oleosins are abundant seed proteins associated with the phospholipid monolayer membrane of oil bodies, which are a means for storing lipids in the plant cell. Analysis of the contents of lipid bodies has demonstrated that in addition to triglyceride and membrane lipids, there are also several polypeptides/proteins associated with the surface or lumen of the oil body (Bowman-Vance and Huang, 1987, J. Biol. Chem., 262:11275-11279, Murphy et al., 1989, Biochem. J., 258:285-293, Taylor et al., 1990, Planta, 181:18-26). Oil-body proteins have been identified in a wide range of taxonomically diverse species (Moreau et al., 1980, Plant Physiol., 65:1176-1180; Qu et al., 1986, Biochem. J., 235:57-65) and have been shown to be uniquely localized in oil-bodies and not found in organelles of vegetative tissues. In Brassica napus (rapeseed, canola) there are at least three polypeptides associated with the oil-bodies of developing seeds (Taylor et al., 1990, Planta, 181:18-26).

[0393] One of the most abundant proteins associated with the phospholipid monolayer membrane of oil bodies are the oleosins. The first oleosin gene, L3, was cloned from maize by selecting clones whose in vitro translated products were recognized by an anti-L3 antibody (Vance et al. 1987 J. Biol. Chem. 262:11275-11279). Subsequently, different isoforms of oleosin genes from such different species as Brassica, soybean, carrot, pine, and Arabidopsis have been cloned (Huang, A. H. C., 1992, Ann. Reviews Plant Phys. and Plant Mol. Biol. 43:177-200; Kirik et al., 1996 Plant Mol. Biol. 31:413-417; Van Rooijen et al., 1992 Plant Mol. Biol. 18:1177-1179; Zou et al., Plant Mol. Biol. 31:429-433. Oleosin protein sequences predicted from these genes are highly conserved, especially for the central hydrophobic domain. All of these oleosins have the characteristic feature of three distinctive domains. An amphipathic domain of 40-60 amino acids is present at the N-terminus; a totally hydrophobic domain of 68-74 amino acids is located at the center; and an amphipathic .alpha.-helical domain of 33-40 amino acids is situated at the C-terminus (Huang, A. H. C. 1992).

[0394] A maize oleosin has been expressed in seed oil bodies in Brassica napus transformed with a Zea mays oleosin gene. The gene was expressed under the control of regulatory elements from a Brassica gene encoding napin, a major seed storage protein. The temporal regulation and tissue specificity of expression was reported to be correct for a napin gene promoter/terminator (Lee et al., 1991, Proc. Natl. Acad. Sci. U.S.A., 88:6181-6185).

[0395] By providing a subset of genes encoding oleosins, it is now possible to modify the oleosin content in the phospholipid monolayer membrane of oil bodies by either introducing the genes provided herein into a plant and overexpressing said gene in said plant or, in the alternative, by down-regulating expression of the endogenous oleosin encoding genes in the plant using method known in the art including anti-sense or dsRNAi techniques.

[0396] In one specific embodiment, the present invention thus relates to a polynucleotide comprising a nucleotide sequence encoding an oleosin protein, which nucleotide sequence is substantially similar to a nucleic acid sequence encoding a polypeptide as given in SEQ ID NOs: 258 and 260.

[0397] More specifically, the invention relates to a polynucleotide comprising a nucleotide sequence encoding an oleosin protein, which is up-regulated during grain filling and has at least between 70%, and 99% amino acid sequence identity to at least one polypeptide of SEQ ID NOs: 258 and 260, with any individual number within this range of between 70% and 99% also being part of the invention.

[0398] The invention further relates to a polynucleotide comprising a nucleotide sequence encoding an oleosin protein, which is up-regulated during grain filling and immunologically reactive with antibodies raised against a polypeptide of SEQ ID NOs: 258 and 260.

[0399] More particularly, the invention relates to a polynucleotide comprising a nucleotide sequence
[0400] a) as given in any one of SEQ ID NOs: 257 and 259 or a part thereof which still encodes a partial-length polypeptide having substantially the same activity as the full-length polypeptide, e.g., at least 50%, more preferably at least 80%, even more preferably at least 90% to 95% the activity of the full-length polypeptide;
[0401] b) having substantial similarity to (a);
[0402] c) capable of hybridizing to (a) or the complement thereof;
[0403] d) capable of hybridizing to a nucleic acid comprising 50 to 200 or more consecutive nucleotides of a nucleotide sequence given in any one of SEQ ID NOs: 257 and 259, or the complement thereof;
[0404] e) complementary to (a), (b) or (c); and
[0405] f) which is the reverse complement of (a), (b) or (c).

[0406] At least one of the genes provided herein, which is up-regulated during grain filling, encodes a phytoene dehydrogenase polypeptide that is involved in carotenoid biosynthesis and can thus be used to modify caroteinoid production in grain.

[0407] Carotenoids are natural pigments that are essential to microbial, plant, and animal life. In photosynthetic organisms, they act as potent antioxidants that negate the lethal effects of singlet oxygen and superoxide formed during oxygen production. As human dietary constituents, these lipophilic antioxidants provide our cells with chemical protectants against the damaging effects of oxidation. Acting as chemical scavengers, carotenoids play roles in the prevention of cancer and chronic maladies, including heart disease.

[0408] Phytoene (7,8,11,12,7′,8′,11′,12′-.omega. octahydro-.omega., omega.-carotene) is the first carotenoid in the carotenoid biosynthesis pathway and is produced by the dimerization of a 20-carbon atom precursor, geranylgeranyl pyrophosphate (GGPP). Phytoene has useful applications in treating skin disorders (U.S. Pat. No. 4,642,318) and is itself a precursor for colored carotenoids. Aside from certain mutant organisms, such as Phycomyces blakesleeanus carB, no current methods are available for producing phytoene via any biological process.

[0409] In some organisms, the red carotenoid lycopene (.omega.,.omega.-carotene) is the next carotenoid produced in the phytoene in the pathway. Lycopene imparts the characteristic red color to ripe tomatoes.

[0410] Lycopene has utility as a food colorant. It is also an intermediate in the biosynthesis of other carotenoids in some bacteria, fungi and green plants.

[0411] Lycopene is prepared biosynthetically from phytoene through four sequential dehydrogenation reactions by the removal of eight atoms of hydrogen. The enzymes that remove hydrogen from phytoene are phytoene dehydrogenases. One or more phytoene dehydrogenases can be used to convert phytoene to lycopene and dehydrogenated derivatives of phytoene intermediate to lycopene are also known. For example, some strains of Rhodobacter sphaeroides contain a phytoene dehydrogenase that removes six atoms of hydrogen from phytoene to produce neurosporene.

[0412] Lycopene is an intermediate in the biosynthesis of caaotenoids in some bacteria, fungi, and all green plants. Carotenoid-specific genes that can be used for synthesis of lycopene from the ubiquitous precursor farnesyl pyrophosphate include those for the enzymes GGPP synthase, phytoene synthase, and phytoene dehydrogenase-4H.

[0413] In one specific embodiment the present invention relates to a polynucleotide comprising a nucleotide sequence encoding a polypeptide the activity of which is involved in or associated with the dehydrogenation of phytoene and the expression of which is up-regulated during grain filling, which nucleotide sequence is substantially similar to a nucleic acid sequence encoding a polypeptide as given in SEQ ID NO: 278.

[0414] More specifically, the invention relates to a polynucleotide comprising a nucleotide sequence encoding a polypeptide the activity of which is involved in or associated with the dehydrogenation of phytoene and the expression of which is up-regulated during grain filling and which has at least between 70%, and 99/o amino acid sequence identity to at least one polypeptide of SEQ ID NOs: 278, with any individual number within this range of between 70% and 99% also being part of the invention.

[0415] The invention further relates to a polynucleotide comprising a nucleotide sequence encoding a polypeptide the activity of which is involved in or associated with the dehydrogenation of phytoene and the expression of which is up-regulated during grain filling and which is immunologically reactive with antibodies raised against a polypeptide of SEQ ID NOs: 278.

[0416] More particularly, the invention relates to a polynucleotide comprising a nucleotide sequence
[0417] a) as given in any one of SEQ ID NOs: 277 or a part thereof which still encodes a partial-length polypeptide having substantially the same activity as the full-length polypeptide, e.g., at least 50%, more preferably at least 80%, even more preferably at least 90% to 95% the activity of the full-length polypeptide;
[0418] b) having substantial similarity to (a);
[0419] c) capable of hybridizing to (a) or the complement thereof;
[0420] d) capable of hybridizing to a nucleic acid comprising 50 to 200 or more consecutive nucleotides of a nucleotide sequence given in any one of SEQ ID NOs: 277, or the complement thereof;
[0421] e) complementary to (a), (b) or (c); and
[0422] f) which is the reverse complement of (a), (b) or (c).

[0423] Another subset of genes that is provided as part of the invention comprises nucleic acid molecules that are involved in the transcriptional control of the highly coordinated grain filling process.

[0424] Transcription factors are proteins that bind to the enhancer or promoter regions and interact such that transcription occurs from only a small group of promoters in any cell. Most transcription factors can bind to specific DNA sequences, and these trans-regulatory proteins can be grouped together in families based on similarities in structure. Within such a family, proteins share a common framework structure in their respective DNA-binding sites, and slight differences in the amino acids at the binding site can alter the sequence of the DNA to which it binds. In addition to having this sequence-specific DNA-binding domain, transcription factors contain a domain involved in activating the transcription of the gene whose promoter or enhancer it has bound. Usually, this trans-activating domain enables that transcription factor to interact with proteins involved in binding RNA polymerase. This interaction often enhances the efficiency with which the basal transcriptional complex can be built and bind RNA polymerase E. There are several families of transcription factors, and those discussed here are just some of the main types.

[0425] The gene subset provided herein includes a gene which encodes a polypeptide that is similar to the CREB-binding protein from Mus sp (as represented by SEQ ID NO: 301), and is highly expressed in aleurone and endosperm tissues during grain filling. CREB-binding protein (CBP) is a necessary component of the CREB/PKA paradigm of gene regulation. The acetylation of histones and other proteins has been linked to gene regulation, and CBP has a potent intrinsic acetyltransferase (AT) enzymatic domain. CREB belongs to a class of proteins whose phosphorylation appears specifically to enhance their trans-activation potential (Arias J, et al Nature 1994 Jul. 21;370(6486):226-9).

[0426] CBP possesses intrinsic histone acetyltransferase activity, and can acetylate not only histones but also certain transcriptional factors such as GATA1; p53 and also myb-type transcription factors such as c-Myb (Yuji Sano and Shunsuke Ishii J. Biol. Chem., Vol. 276, Issue 5, 3674-3682, Feb. 2, 2001). Acetylation of c-Myb by CBP increases the trans-activating capacity of c-Myb by enhancing its association with CBP. These results demonstrate a novel molecular mechanism of regulation of c-Myb activity.

[0427] In rice, 70 known and putative MYB genes could be identified, some of which show interesting expression patterns such as those given in SEQ ID NOs: 311-321. The expression pattern of these transcription factors suggests that they play a key role during rice grain filling.

[0428] Another transcription factor gene (as represented by SEQ ID NOs: 305) included in this subset encodes a protein that has structural similarity to the yeast HAP5 transcriptional activator protein. In yeast, the HAP5 protein is a component of the HAP (Hap2p-Hap3p-Hap4pHap5p) CCAAT-box-binding transcriptional activation complex and is essential for the binding activity of the complex.

[0429] A further transcription factor gene within this subset is represented by SEQ ID NO: 307 which encodes a bZIP-type transcription factor similar to the plant G-box binding factor GBF4, that was found in Arabidopsis. GBF4, in a manner reminiscent of the Fos-related oncoproteins of mammalian systems, cannot bind to DNA as a homodimer, although it contains a basic region capable of specifically recognizing the G-box and G-box-like elements. However, GBF4 can interact with GBF2 and GBF3 to bind DNA as heterodimers. Mutagenesis of the leucine zipper of GBF4 indicates that the mutation of a single amino acid confers upon the protein the ability to recognize the G-box as a homodimer, apparently by altering the charge distribution within the leucine zipper (A E Menkens and A R Cashmore (1994) PNAS 91: 2522-2526).

[0430] Another of the transcription factor genes within this subset encodes a protein that has a zinc finger domain and is similar to a zinc-finger type transcription factor found in Arabidopsis (gi|6899934).

[0431] Zinc finger proteins include WT-1 (a important transcription factor critical in the formation of the kidney and gonads); the ubiquitous transcription factor Sp1; Xenopus 5S rRNA transcription factor TFIIIA; Krox 20 (a protein that regulates gene expression in the developing hindbrain); Egr-1 (which commits white blood cell development to the macrophage lineage); Krippel (a protein that specifes abdominal cells in Drosophila); and numerous steroid-binding transcription factors. Each of these proteins has two or more “DNA-binding fingers,” a-helical domains whose central amino acids tend to be basic. These domains are linked together in tandem and are each stabilized by a centrally located zinc ion coordinated by two cysteines (at the base of the helix) and two internal histidines. The crystal structure shows that the zinc fingers bind in the major groove of the DNA.

[0432] The expression pattern of these transcription factors during grain filling suggests that they play a key role during rice grain development. This is further supported by the fact that the AACA promoter element, which is known to be conserved in many seed storage protein genes, is over-represented in the promoters of the grain filling sub-set genes according to the invention. This subset comprises genes the protein products of which are involved in diverse cellular functions, including carbohydrate, protein and fatty acid metabolism, nutrient transportation, and transcription and translation. The ACCA promoter element was thus demonstrated to be likely one of the key elements in the coordination of different major pathways during grain development.

[0433] In one embodiment the invention thus relates to a polynucleotide comprising a nucleotide sequence that encodes a polypeptide that acts as a transcription factor and the expression of which is up-regulates during grain filling, which nucleotide sequence is substantially similar to a nucleic acid sequence encoding a polypeptide as given in any one of the SEQ ID NOs of table 11 such as SEQ ID NOs: 302-328.

[0434] More specifically, the invention relates to a polynucleotide comprising a nucleotide sequence encodes a polypeptide that acts as a transcription factor and the expression of which is up-regulated during grain filling and which has at least between 700%, and 99% amino acid sequence identity to at least one polypeptide as given in any one of the SEQ ID NOs of table 11 such as SEQ ID NOs: 302-328, with any individual number within this range of between 70% and 99% also being part of the invention.

[0435] The invention further relates to a polynucleotide comprising a nucleotide sequence encodes a polypeptide that acts as a transcription factor and the expression of which is up-regulated during grain filling and which is immunologically reactive with antibodies raised against a polypeptide as given in any one of the SEQ ID NOs of table 11 such as SEQ ID NOs: 302-328.

[0436] More particularly, the invention relates to a polynucleotide comprising a nucleotide sequence
[0437] a) as given in any one of the SEQ ID NOs of table 11 such as SEQ ID NOs: 301-327 or a part thereof which still encodes a partial-length polypeptide having substantially the same activity as the full-length polypeptide, e.g., at least 50%, more preferably at least 80%, even more preferably at least 90% to 95% the activity of the full-length polypeptide;
[0438] b) having substantial similarity to (a);
[0439] c) capable of hybridizing to (a) or the complement thereof;
[0440] d) capable of hybridizing to a nucleic acid comprising 50 to 200 or more consecutive nucleotides of a nucleotide sequence as given in any one of the SEQ ID NOs of table 11 such as SEQ ID NOs: 301-327, or the complement thereof;
[0441] e) complementary to (a), (b) or (c); and
[0442] f) which is the reverse complement of (a), (b) or (c).

[0443] By changing the expression level and/or pattern of at least one transcription factor as provided herein, which is involved in the regulation and coordination of grain filling in plants, it is possible to modify the grain filling process to obtain grain with a modified nutritional composition and/or quality characteristics.

[0444] A further subset of genes which is provided herein comprises genes encoding polypeptides the activity of which is involved in or associated with amino acid metabolism.

[0445] In particular, the invention relates to a polynucleotide comprising a nucleotide sequence encoding a polypeptide the activity of which is involved or associated with the metabolism of amino acids and the expression of which is up-regulated during grain filling, which nucleotide sequence is substantially similar to a nucleic acid sequence encoding a polypeptide as given in any one of the SEQ ID NOs of table 10 such as SEQ ID NOs: 282-300.

[0446] More specifically, the invention relates to a polynucleotide comprising a nucleotide sequence encoding a polypeptide the activity of which is involved or associated with the metabolism of amino acids and the expression of which is up-regulated during grain filling, which polypeptide has at least between 70%, and 99% amino acid sequence identity to at least one polypeptide as given in any one of the SEQ ID NOs of table 10 such as SEQ ID NOs: 282-300, with any individual number within this range of between 70% and 99% also being part of the invention.

[0447] The invention further relates to a polynucleotide comprising a nucleotide sequence encoding a polypeptide the activity of which is involved or associated with the metabolism of amino acids and the expression of which is up-regulated during grain filling, which polypeptide is immunologically reactive with antibodies raised against a polypeptide as given in any one of the SEQ ID NOs of table 10 such as SEQ ID NOs: 282-300.

[0448] More particularly, the invention relates to a polynucleotide comprising a nucleotide sequence
[0449] a) as given in any one of the SEQ ID NOs of table 10 such as SEQ ID NOs: 281-299 or a part thereof which still encodes a partial-length polypeptide having substantially the same activity as the full-length polypeptide, e.g., at least 50%, more preferably at least 80%, even more preferably at least 90% to 95% the activity of the full-length polypeptide;
[0450] b) having substantial similarity to (a);
[0451] c) capable of hybridizing to (a) or the complement thereof;
[0452] d) capable of hybridizing to a nucleic acid comprising 50 to 200 or more consecutive nucleotides of a nucleotide sequence as given in any one of the SEQ ID NOs of table 10 such as SEQ ID NOs: 281-299, or the complement thereof;
[0453] e) complementary to (a), (b) or (c); and

[0454] f) which is the reverse complement of (a), (b) or (c).

[0455] In a final embodiment, the present invention provides a subset of genes encoding polypeptides for which no biological function is known so far. It is within the scope of this invention, that the expression products of these genes, respresentative examples of which are provided in column B of table 3, can for the first time be associated with a biological function. Based on their mRNA expression characteristics and their specific expression pattern during grain filling it is suggested that they are involved in or associated with nutrient partitioning during the grain filling process.

[0456] By modifying the expression of at least one of the genes within this subgroup it is, therefore, possible to modify the compositional characteristics and thus the nutritional properties of the plant grain.

[0457] The present invention provides a set of genes, which were shown to be preferentially up-regulated and to share a similar expression pattern during the process of grain filling as specified hereinbefore. The genes within this subgroup are useful tools for generating plants which produce grain with modified compositional characteristics leading to improved nutritional properties.

[0458] According to one embodiment, the present invention is directed to a nucleic acid molecule comprising a nucleotide sequence isolated or obtained from any plant which encodes a polypeptide that has at least 70% amino acid sequence identity to a polypeptide encoded by a gene comprising any one of SEQ ID NOs provided in the Sequence Listing.

[0459] Based on the Oryza nucleic acid sequences of the present invention as given in the SEQ ID NOs of the Sequence Listing, orthologs may be identified or isolated from the genome of any desired organism, preferably from another plant, according to well known techniques based on their sequence similarity to the Orya nucleic acid sequences, e.g., hybridization, PCR or computer generated sequence comparisons. For example, all or a portion of a particular Oryza nucleic acid sequence is used as a probe that selectively hybridizes to other gene sequences present in a population of cloned genomic DNA fragments or cDNA fragments (i.e., genomic or cDNA libraries) from a chosen source organism. Further, suitable genomic and cDNA libraries may be prepared from any cell or tissue of an organism. Such techniques include hybridization screening of plated DNA libraries (either plaques or colonies; see, e.g., Sambrook et al., 1989) and amplification by PCR using oligonucleotide primers preferably corresponding to sequence domains conserved among related polypeptide or subsequences of the nucleotide sequences provided herein (see, e.g., Innis et al., 1990). These methods are particularly well suited to the isolation of gene sequences from organisms closely related to the organism from which the probe sequence is derived. The application of these methods using the Oryza sequences as probes is well suited for the isolation of gene sequences from any source organism, preferably other plant species. In a PCR approach, oligonucleotide primers can be designed for use in PCR reactions to amplify corresponding DNA sequences from cDNA or genomic DNA extracted from any plant of interest. Methods for designing PCR primers and PCR cloning are generally known in the art.

[0460] In hybridization techniques, all or part of a known nucleotide sequence is used as a probe that selectively hybridizes to other corresponding nucleotide sequences present in a population of cloned genomic DNA fragments or cDNA fragments (i.e., genomic or cDNA libraries) from a chosen organism. The hybridization probes may be genomic DNA fragments, cDNA fragments, RNA fragments, or other oligonucleotides, and may be labeled with a detectable group such as ³²P, or any other detectable marker. Thus, for example, probes for hybridization can be made by is labeling synthetic oligonucleotides based on the sequence of the invention. Methods for preparation of probes for hybridization and for construction of cDNA and genomic libraries are generally known in the art and are disclosed in Sambrook et al. (1989). In general, sequences that hybridize to the sequences disclosed herein will have at least 40% to 50%, about 60% to 70% and even about 80% 85%, 90%, 95% to 98% or more identity with the disclosed sequences. That is, the sequence similarity of sequences may range, sharing at least about 40% to 50%, about 60% to 70%, and even about 80%, 85%, 900/0, 95% to 98% sequence similarity, with each individual number within the ranges given above also being part of the invention.

[0461] The nucleic acid molecules of the invention can also be identified by, for example, a search of known databases for genes encoding polypeptides having a specified amino acid sequence identity or DNA having a specified nucleotide sequence identity. Methods of alignment of sequences for comparison are well known in the art and are described hereinabove.

[0462] In a further embodiment, the invention provides isolated nucleic acid molecules comprising a plant nucleotide sequence that induces transcription of a linked nucleic acid segment in a plant or plant cell, e.g., a linked nucleic acid molecule comprising an open reading frame for or encoding a structural or regulatory gene, in a tissue specific or tissue preferential manner.

[0463] In a specific embodiment, the invention provides isolated nucleic acid molecules comprising a plant nucleotide sequence that induces transcription of a linked nucleic acid segment in a plant or plant cell, e.g., a linked nucleic acid molecule comprising an open reading frame for or encoding a structural or regulatory gene, in a seed-specific or seed-preferential manner. In particular, the plant nucleotide sequence according to the invention is substantially less active in vegetative tissue as compared to seed and is most active in the endosperm. The transcription inducing activity icreases during seed development and reaches its peak at or around the time of grain filling.

[0464] In particular, the nucleotide sequence of the invention directs seeds- (e.g. endosperm) specific or seeds- (e.g. endosperm) preferential transcription of a linked nucleic acid segment in a plant or plant cell and is preferably obtained or obtainable from plant genomic DNA having a gene comprising an open reading frame (ORF) encoding a polypeptide which is substantially similar, and preferably has at least 70%, e.g., 71%, 72%, 73%, 74%, 75%, 76%, 77%, 78%, 79%, 80%, 81%, 82%, 83%, 84%, 85%, 86%, 87%, 88%, 89%, and even 90% or more, e.g., 91%, 92%, 93%, 94%, 95%, 96%, 97%, 98%, and 99%, amino acid sequence identity, to a polypeptide encoded by an Oryza, e.g., Oryza sativa, gene comprising any one of SEQ ID NOs: 2-462 (e.g., including a promoter obtained or obtainable from any one of SEQ ID NOs: 643-883) which directs seed-specific (or seed-preferential) transcription of a linked nucleic acid segment.

[0465] The promoters of the invention include a consecutive stretch of about 25 to 2000, including 50 to 500 or 100 to 250, and up to 1000 or 1500, contiguous nucleotides, e.g., 40 to about 750, 60 to about 750, 125 to about 750, 250 to about 750, 400 to about 750, 600 to about 750, of any one of SEQ ID NOs: 643-883, or the promoter orthologs thereof, which include the minimal promoter region.

[0466] In a particular embodiment of the invention said consecutive stretch of about 25 to 2000, including 50 to 500 or 100 to 250, and up to 1000 or 1500, contiguous nucleotides, e.g., 40 to about 750, 60 to about 750, 125 to about 750, 250 to about 750, 400 to about 750, 600 to about 750, has at least 75%, preferably 80%, more preferably 90% and most preferably 95%, nucleic acid sequence identity with a corresponding consecutive stretch of about 25 to 2000, including 50 to 500 or 100 to 250, and up to 1000 or 1500, contiguous nucleotides, e.g., 40 to about 750, 60 to about 750, 125 to about 750, 250 to about 750, 400 to about 750, 600 to about 750, of any one of SEQ ID NOs: 643-883 or the promoter orthologs thereof, which include the minimal promoter region. The above defined stretch of contiguous nucleotides preferably comprises one or more promoter motifs, e.g., for seed-specific promoters, motifs selected from the group consisting of the P box and GCNA elements, including but not limited to TGTAAAG and TGA(G/C)TCA and a transcription start site.

[0467] In case of promoters directing tissue-specific transcription of a linked nucleic acid segment in a plant or plant cell such as, for example, a promoter directing seed-specific or seed-preferential, but especially endosperm-specific or endosperm-preferential transcription, it is further preferred that previously defined stretch of contiguous nucleotides comprises further motifs that participate in the tissue specificity of said stretch(es) of nucleotides.

[0468] Generally, the promoters of the invention may be employed to express a nucleic acid segment that is operably linked to said promoter such as, for example, an open reading frame, or a portion is thereof, an anti-sense sequence, or a transgene in plants. The open reading frame may be obtained from an insect resistance gene, a disease resistance gene such as, for example, a bacterial disease resistance gene, a fungal disease resistance gene, a viral disease resistance gene, a nematode disease resistance gene, a herbicide resistance gene, a gene affecting grain composition or quality, a nutrient utilization gene, a mycotoxin reduction gene, a male sterility gene, a selectable marker gene, a screenable marker gene, a negative selectable marker, a positive selectable marker, a gene affecting plant agronomic characteristics, i.e., yield, standability, and the like, or an environment or resistance gene, i.e., one or more genes that confer herbicide resistance or tolerance, insect resistance or tolerance, disease resistance or tolerance (viral, bacterial, fungal, oomycete, or nematode), stress tolerance or resistance (as exemplified by resistance or tolerance to drought, heat, chilling, fleezing, excessive moisture, salt stress, or oxidative stress), increased yields, food content and makeup, physical appearance, male sterility, drydown, standability, prolificacy, starch properties or quantity, oil quantity and quality, amino acid or protein composition, and the like. By “resistant” is meant a plant which exhibits substantially no phenotypic changes as a consequence of agent administration, infection with a pathogen, or exposure to stress. By “tolerant” is meant a plant which, although it may exhibit some phenotypic changes as a consequence of infection, does not have a substantially decreased reproductive capacity or substantially altered metabolism.

[0469] For instance, seed-specific promoters may be useful for expressing genes as well as for producing large quantities of protein, for expressing oils or proteins of interest, e.g., antibodies, genes for increasing the nutritional value of the seed and the like. In particular, the seed-specific or seed-preferential promoters accroding to the invention such as those provided in SEQ ID NOs: 643-883 may be useful for expressing the Open Reading Frames which are represented by the nucleotide sequences of SEQ ID NOs: 1-461 and 501-511, respectively.

[0470] Obtaining sufficient levels of transgene expression in the appropriate plant tissues is an important aspect in the production of genetically engineered crops. Expression of heterologous DNA sequences in a plant host is dependent upon the presence of an operably linked promoter that is functional within the plant host. Choice of the promoter sequence will determine when and where within the organism the heterologous DNA sequence is expressed.

[0471] It is specifically contemplated by the present invention that one could use any one of the promoters according to the present invention in unaltered or altered form. Mutagenization of a promoter of the present invention such as those provided in SEQ ID NOs: 643-883 may potentially improve the utility of the elements for the expression of transgenes in plants. The mutagenesis of these elements can be carried out at random and the mutagenized promoter sequences screened for activity in a trial-by-error procedure.

[0472] Alternatively, particular sequences which provide the promoter with desirable expression characteristics, or the promoter with expression enhancement activity, could be identified and these or similar sequences introduced into the sequences via mutation. It is further contemplated that one could mutagenize these sequences in order to enhance their expression of transgenes in a particular species.

[0473] The means for mutagenizing a DNA segment encoding a promoter sequence of the current invention are well-known to those of skill in the art. As indicated, modifications to promoter or other regulatory element may be made by random, or site-specific mutagenesis procedures. The promoter and other regulatory element may be modified by altering their structure through the addition or deletion of one or more nucleotides from the sequence which encodes the corresponding un-modified sequences.

[0474] Mutagenesis may be performed in accordance with any of the techniques known in the art, such as, and not limited to, synthesizing an oligonucleotide having one or more mutations within the sequence of a particular regulatory region. In particular, site-specific mutagenesis is a technique useful in the preparation of promoter mutants, through specific mutagenesis of the underlying DNA. The technique further provides a ready ability to prepare and test sequence variants, for example, incorporating one or more of the foregoing considerations, by introducing one or more nucleotide sequence changes into the DNA. Site-specific mutagenesis allows the production of mutants through the use of specific oligonucleotide sequences which encode the DNA sequence of the desired mutation, as well as a sufficient number of adjacent nucleotides, to provide a primer sequence of sufficient size and sequence complexity to form a stable duplex on both sides of the deletion junction being traversed. Typically, a primer of about 17 to about 75 nucleotides or more in length is preferred, with about 10 to about 25 or more residues on both sides of the junction of the sequence being altered.

[0475] In general, the technique of site-specific mutagenesis is well known in the art, as exemplified by various publications. As will be appreciated, the technique typically employs a phage vector which exists in both a single stranded and double stranded form. Typical vectors useful in site-directed mutagenesis include vectors such as the M13 phage. These phage are readily commercially available and their use is generally well known to those skilled in the art.

[0476] Double stranded plasmids also are routinely employed in site directed mutagenesis which eliminates the step of transferring the gene of interest from a plasmid to a phage.

[0477] In general, site-directed mutagenesis in accordance herewith is performed by first obtaining a single-stranded vector or melting apart of two strands of a double stranded vector which includes within its sequence a DNA sequence which encodes the promoter. An oligonucleotide primer bearing the desired mutated sequence is prepared, generally synthetically. This primer is then annealed with the single-stranded vector, and subjected to DNA polymerizing enzymes such as E. coli polymerase I Klenow fragment, in order to complete the synthesis of the mutation-bearing strand. Thus, a heteroduplex is formed wherein one strand encodes the original non-mutated sequence and the second strand bears the desired mutation.

[0478] This heteroduplex vector is then used to transform or transfect appropriate cells, such as E. coli cells, and cells are selected which include recombinant vectors bearing the mutated sequence arrangement. Vector DNA can then be isolated from these cells and used for plant transformation. A genetic selection scheme is devised by Kunkel et al. (1987) to enrich for clones incorporating mutagenic oligonucleotides. Alternatively, the use of PCR with commercially available thermostable enzymes such as Taq polymerase may be used to incorporate a mutagenic oligonucleotide primer into an amplified DNA fragment that can then be cloned into an appropriate cloning or expression vector. The PCR-mediated mutagenesis procedures of Tomic et al. (1990) and Upender et al. (1995) provide two examples of such protocols. A PCR employing a thermostable ligase in addition to a thermostable polymerase also may be used to incorporate a phosphorylated mutagenic oligonucleotide into an amplified DNA fragment that may then be cloned into an appropriate cloning or expression vector. The mutagenesis procedure described by Michael (1994) provides an example of one such protocol.

[0479] The preparation of sequence variants of the selected promoter-encoding DNA segments using site-directed mutagenesis is provided as a means of producing potentially useful species and is not meant to be limiting as there are other ways in which sequence variants of DNA sequences may be obtained. For example, recombinant vectors encoding the desired promoter sequence may be treated with mutagenic agents, such as hydroxylamine, to obtain sequence variants.

[0480] As used herein, the term “oligonucleotide directed mutagenesis procedure” refers to template-dependent processes and vector-mediated propagation which result in an increase in the concentration of a specific nucleic acid molecule relative to its initial concentration, or in an increase in the concentration of a detectable signal, such as amplification. As used herein, the term “oligonucleotide directed mutagenesis procedure” also is intended to refer to a process that involves the template-dependent extension of a primer molecule. The term template-dependent process refers to nucleic acid synthesis of an RNA or a DNA molecule wherein the sequence of the newly synthesized strand of nucleic acid is dictated by the well-known rules of complementary base pairing (see, for example, Watson and Ramstad, 1987). Typically, vector mediated methodologies involve the introduction of the nucleic acid fragment into a DNA or RNA vector, the clonal amplification of the vector, and the recovery of the amplified nucleic acid fragment. Examples of such methodologies are provided by U.S. Pat. No. 4,237,224. A number of template dependent processes are available to amplify the target sequences of interest present in a sample, such methods being well known in the art and specifically disclosed herein below.

[0481] Where a clone comprising a promoter has been isolated in accordance with the instant invention, one may wish to delimit the essential promoter regions within the clone. One efficient, targeted means for preparing mutagenizing promoters relies upon the identification of putative regulatory elements within the promoter sequence. This can be initiated by comparison with promoter sequences known to be expressed in similar tissue-specific or developmentally unique manner. Sequences which are shared among promoters with similar expression patterns are likely candidates for the binding of transcription factors and are thus likely elements which confer expression patterns. Confirmation of these putative regulatory elements can be achieved by deletion analysis of each putative regulatory region followed by functional analysis of each deletion construct by assay of a reporter gene which is functionally attached to each construct. As such, once a starting promoter sequence is provided, any of a number of different deletion mutants of the starting promoter could be readily prepared.

[0482] As indicated above, deletion mutants, deletion mutants of the promoter of the invention also could be randomly prepared and then assayed. With this strategy, a series of constructs are prepared, each containing a different portion of the clone (a subclone), and these constructs are then screened for activity. A suitable means for screening for activity is to attach a deleted promoter or intron construct which contains a deleted segment to a selectable or screenable marker, and to isolate only those cells expressing the marker gene. In this way, a number of different, deleted promoter constructs are identified which still retain the desired, or even enhanced, activity. The smallest segment which is required for activity is thereby identified through comparison of the selected constructs. This segment may then be used for the construction of vectors for the expression of exogenous genes.

[0483] Furthermore, it is contemplated that promoters combining elements from more than one promoter may be useful. For example, U.S. Pat. No. 5,491,288 discloses combining a Cauliflower Mosaic Virus promoter with a histone promoter. Thus, the elements from the promoters disclosed herein may be combined with elements from other promoters.

[0484] The present invention further provides a composition, an expression cassette or a recombinant vector containing the nucleic acid molecule of the invention as discosed herinbefore, and host cells comprising the expression cassette or vector, e.g., comprising a plasmid.

[0485] In particular, the present invention provides an expression cassette or a recombinant vector comprising a suitable promoter linked to a nucleic acid segment of the invention, representative examples of which are provided in the SEQ ID NOs of the Sequence Listing, which, when present in a plant, plant cell or plant tissue, results in transcription of the linked nucleic acid segment.

[0486] Promoters which are useful for plant transgene expression include those that are inducible, viral, synthetic, constitutive (Odell et al., 1985), temporally regulated, spatially regulated, tissue-specific, and spatio-temporally regulated.

[0487] Where expression in specific tissues or organs is desired, tissue-specific promoters may be used. In contrast, where gene expression in response to a stimulus is desired, inducible promoters are the regulatory elements of choice. Where continuous expression is desired throughout the cells of a plant, constitutive promoters are utilized. Additional regulatory sequences upstream and/or downstream from the core promoter sequence may be included in expression constructs of transformation vectors to bring about varying levels of expression of heterologous nucleotide sequences in a transgenic plant.

[0488] Suitable promoter and/or regulatory sequences further include those that are preferentially or specifically active in plant grain tissue such as, for example, the grain endosperm or the grain embryo.

[0489] Further, the invention provides isolated polypeptides encoded by any one of the open reading frames of the invention, representative examples of which are provided in the SEQ ID NOs of the Sequence Listing, or a fragment thereof, which encodes a polypeptide which has substantially the same activity as the corresponding polypeptide encoded by an ORF given in the SEQ ID NOs of the Sequence Listing, or the orthologs thereof.

[0490] Virtually any DNA composition may be used for delivery to recipient plant cells, e.g., monocotyledonous cells, to ultimately produce fertile transgenic plants in accordance with the present invention. For example, DNA segments or fragments in the form of vectors and plasmids, or linear DNA segments or fragments, in some instances containing only the DNA element to be expressed in the plant, and the like, may be employed. The construction of vectors which may be employed in conjunction with the present invention will be known to those of skill of the art in light of the present disclosure (see, e.g., Sambrook et al., 1989; Gelvin et al., 1990).

[0491] It is one of the objects of the present invention to provide recombinant DNA molecules comprising a nucleotide sequence which directs transcription according to the invention operably linked to a nucleic acid segment or sequence of interest.

[0492] The nucleic acid segment of interest can, for example, code for a ribosomal RNA, an antisense RNA or any other type of RNA that is not translated into protein. In another preferred embodiment of the invention, the nucleic acid segment of interest is translated into a protein product. The nucleotide sequence which directs transcription and/or the nucleic acid segment may be of homologous or heterologous origin with respect to the plant to be transformed. A recombinant DNA molecule useful for introduction into plant cells includes that which has been derived or isolated from any source, that may be subsequently characterized as to structure, size and/or function, chemically altered, and later introduced into plants. An example of a nucleotide sequence or segment of interest “derived” from a source, would be a nucleotide sequence or segment that is identified as a useful fragment within a given organism, and which is then chemically synthesized in essentially pure form. An example of such a nucleotide sequence or segment of interest “isolated” from a source, would be nucleotide sequence or segment that is excised or removed from said source by chemical means, e.g., by the use of restriction endonucleases, so that it can be further manipulated, e.g., amplified, for use in the invention, by the methodology of genetic engineering. Such a nucleotide sequence or segment is commonly referred to as “recombinant.”

[0493] Therefore a useful nucleotide sequence, segment or fragment of interest includes completely synthetic DNA, semi-synthetic DNA, DNA isolated from biological sources, and DNA derived from introduced RNA. Generally, the introduced DNA is not originally resident in the plant genotype which is the recipient of the DNA, but it is within the scope of the invention to isolate a gene from a given plant genotype, and to subsequently introduce multiple copies of the gene into the same genotype, e.g., to enhance production of a given gene product such as a storage protein or a protein that is involved in carbohydrate metabolism or any other gene of interest as provided in the SEQ ID NOs of the sequence listing.

[0494] The introduced recombinant DNA molecule includes but is not limited to, DNA from plant genes, and non-plant genes such as those from bacteria, yeasts, animals or viruses. The introduced DNA can include modified genes, portions of genes, or chimeric genes, including genes from the same or different genotype. The term “chimeric gene” or “chimeric DNA” is defined as a gene or DNA sequence or segment comprising at least two DNA sequences or segments from species which do not combine DNA under natural conditions, or which DNA sequences or segments are positioned or linked in a manner which does not normally occur in the native genome of untransformed plant.

[0495] The introduced recombinant DNA molecule used for transformation herein may be circular or linear, double-stranded or single-stranded. Generally, the DNA is in the form of chimeric DNA, such as plasmid DNA, that can also contain coding regions flanked by regulatory sequences which promote the expression of the recombinant DNA present in the resultant plant.

[0496] Generally, the introduced recombinant DNA molecule will be relatively small, i.e., less than about 30 kb to minimize any susceptibility to physical, chemical, or enzymatic degradation which is known to increase as the size of the nucleotide molecule increases. As noted above, the number of proteins, RNA transcripts or mixtures thereof which is introduced into the plant genome is preferably preselected and defined, e.g., from one to about 5-10 such products of the introduced DNA may be formed.

[0497] This expression cassette or vector may be contained in a host cell. The expression cassette or vector may augment the genome of a transformed plant or may be maintained extrachromosomally. The expression cassette may be operatively linked to a structural gene, the open reading frame thereof, or a portion thereof. The expression cassette may further comprise a Ti plasmid and be contained in an Agrobacterium tumefaciens cell; it may be carried on a microparticle, wherein the microparticle is suitable for ballistic transformation of a plant cell; or it may be contained in a plant cell or protoplast. Further, the expression cassette or vector can be contained in a transformed plant or cells thereof, and the plant may be a dicot or a monocot. In particular, the plant may be a cereal plant.

[0498] Obtaining sufficient levels of transgene expression in the appropriate plant tissues is an important aspect in the production of genetically engineered crops. Expression of heterologous DNA sequences in a plant host is dependent upon the presence of an operably linked promoter that is functional within the plant host. Choice of the promoter sequence will determine when and where within the organism the heterologous DNA sequence is expressed.

[0499] For example, for overexpression, a plant promoter fragment may be employed which will direct expression of the gene in all tissue; of a regenerated plant. Such promoters are referred to herein as “constitutive” promoters and are active under most environmental conditions and states of development or cell differentiation. Examples of constitutive promoters include the cauliflower mosaic virus (CaMV) ³⁵S transcription initiation region, the 1′- or 2′-promoter derived from T-DNA of Agrobacterium tumafaciens, and other transcription initiation regions from various plant genes known to those of skill. Such genes include for example, the AP2 gene, ACT11 from Arabidopsis (Huang et al. Plant Mol. Biol. 33:125-139 (1996)), Cat3 from Arabidopsis (GenBank No. U43147, Zhong et al., Mol. Gen. Genet. 251:196-203 (1996)), the gene encoding stearoyl-acyl carrier protein desaturase from Brassica napus (Genbank No. X74782, Solocombe et al. Plant Physiol. 104:1167-1176 (1994)), GPc1 from maize (GenBank No. X15596, Martinez et al. J. Mol. Biol. 208:551-565 (1989)), and Gpc2 from maize (GenBank No. U45855, Manjunath et al., Plant Mol. Biol. 33:97-112 (1997)).

[0500] Alternatively, the plant promoter may direct expression of the nucleic acid molecules of the invention in a specific tissue or may be otherwise under more precise environmental or developmental control. Examples of environmental conditions that may effect transcription by inducible promoters include anaerobic conditions, elevated temperature, or the presence of light. Such promoters are referred to here as “inducible” or “tissue-specific” promoters. One of skill will recognize that a tissue-specific promoter may drive expression of operably linked sequences in tissues other than the target tissue. Thus, as used herein a tissue-specific promoter is one that drives expression preferentially in the target tissue, but may also lead to some expression in other tissues as well.

[0501] Examples of promoters under developmental control include promoters that initiate transcription only (or primarily only) in certain tissues, such as fruit, seeds, or flowers. Promoters that direct expression of nucleic acids in ovules, flowers or seeds are particularly useful in the present invention. As used herein a seed-specific or preferential promoter is one which directs expression specifically or preferentially in seed tissues, such promoters may be, for example, ovule-specific, embryo-specific, endosperm-specific, integument-specific, seed coat-specific, or some combination thereof. Examples include a promoter from the ovule-specific BEL1 gene described in Reiser et al. Cell 83:735-742 (1995) (GenBank No. U39944). Other suitable seed specific promoters are derived from the following genes: MAC1 from maize (Sheridan et al. Genetics 142:1009-1020 (1996), Cat3 from maize (GenBank No. L05934, Abler et al., Plant Mol. Biol. 22:10131-1038 (1993), the gene encoding oleosin 18 kD from maize (GenBank No, J05212, Lee et al., Plant Mol. Biol. 26:1981-1987 (1994)), vivparous-1 from Arabidopsis (Genbank No. U93215), the gene encoding oleosin from Arabidopsis (Genbank No. Z17657), Atmycl from Arabidopsis (Urao et al., Plant Mol. Biol. 32:571-576 (1996), the 2 s seed storage protein gene family from Arabidopsis (Conceicao et al. Plant 5:493-505 (1994)) the gene encoding oleosin 20 kD from Brassica napus (GenBank No. M63985), napA from Brassica napus (GenBank No. J02798, Josefsson et al. JBL 26:12196-1301 (1987), the napin gene family from Brassica napus (Sjodahl et al. Planta 197:264-271 (1995), the gene encoding the 2 S storage protein from Brassica napus (Dasgupta et al. Gene 133:301-302 (1993)), the genes encoding oleosin A (Genbank No. U09118) and oleosin B (Genbank No. U09119) from soybean and the gene encoding low molecular weight sulphur rich protein from soybean (Choi et al. Mol Gen, Genet. 246:266-268 (1995)).

[0502] It is specifically contemplated that one could use one of the promoters that are disclosed in co-pending provisional U.S. application Ser. No. 60/325,448, filed Sep. 26, 2001 in unaltered or altered form. Especially preferred are promoters that direct transcription of an associated nucleic acid molecule specifically or preferentially in tissues of the plant grain such as those provided in SEQ ID NOs: 2275-2672.

[0503] Mutagenization of a promoter such as those mentioned hereinbefore or those provided in provisional U.S. application Ser. No. 60/325,448 may potentially improve the utility of the elements for the expression of transgenes in plants. The mutagenesis of these elements can be carried out at random and the mutagenized promoter sequences screened for activity in a trial-by-error procedure.

[0504] Alternatively, particular sequences which provide the promoter with desirable expression characteristics, or the promoter with expression enhancement activity, could be identified and these or similar sequences introduced into the sequences via mutation. It is further contemplated that one could mutagenize these sequences in order to enhance their expression of transgenes in a particular species.

[0505] Furthermore, it is contemplated that promoters combining elements from more than one promoter may be useful. For example, U.S. Pat. No. 5,491,288 discloses combining a Cauliflower Mosaic Virus promoter with a histone promoter. Thus, the elements from the promoters disclosed herein may be combined with elements from other promoters.

[0506] A variety of 5N and 3N transcriptional regulatory sequences are available for use in the present invention. Transcriptional terminators are responsible for the termination of transcription and correct mRNA polyadenylation. The 3N nontranslated regulatory DNA sequence preferably includes from about 50 to about 1,000, more preferably about 100 to about 1,000, nucleotide base pairs and contains plant transcriptional and translational termination sequences. Appropriate transcriptional terminators and those which are known to function in plants include the CaMV 35S terminator, the tml terminator, the nopaline synthase terminator, the pea rbcS E9 terminator, the terminator for the T7 transcript from the octopine synthase gene of Agrobacterium tumefaciens, and the 3N end of the protease inhibitor 1 or 11 genes from potato or tomato, although other 3N elements known to those of skill in the art can also be employed. Alternatively, one also could use a gamma coixin, oleosin 3 or other terminator from the genus Coix.

[0507] Preferred 3N elements include those from the nopaline synthase gene of Agrobacterium tumefaciens (Bevan et al., 1983), the terminator for the T7 transcript from the octopine synthase gene of Agrobacterium tumefaciens, and the 3′ end of the protease inhibitor 1 or 11 genes from potato or tomato.

[0508] As the DNA sequence between the transcription initiation site and the start of the coding sequence, i.e., the untranslated leader sequence, can influence gene expression, one may also wish to employ a particular leader sequence. Preferred leader sequences are contemplated to include those which include sequences predicted to direct optimum expression of the attached gene, i.e., to include a preferred consensus leader sequence which may increase or maintain mRNA stability and prevent inappropriate initiation of translation. The choice of such sequences will be known to those of skill in the art in light of the present disclosure. Sequences that are derived from genes that are highly expressed in plants will be most preferred.

[0509] Other sequences that have been found to enhance gene expression in transgenic plants include intron sequences (e.g., from Adh1, bronze1, actin1, actin 2 (WO 00/760067), or the sucrose synthase intron) and viral leader sequences (e.g., from TMV, MCMV and AMV). For example, a number of non-translated leader sequences derived from viruses are known to enhance expression. Specifically, leader sequences from Tobacco Mosaic Virus (TMV), Maize Chlorotic Mottle Virus (MCMV), and Alfalfa Mosaic Virus (AMV) have been shown to be effective in enhancing expression (e.g., Gallie et al., 1987; Skuzeski et al., 1990). Other leaders known in the art include but are not limited to: Picornavirus leaders, for example, EMCV leader (Encephalomyocarditis 5 noncoding region) (Elroy-Stein et al., 1989); Potyvirus leaders, for example, TEV leader (Tobacco Etch Virus); MDMV leader (Maize Dwarf Mosaic Virus); Human immunoglobulin heavy-chain binding protein (BiP) leader, (Macejak et al., 1991); Untranslated leader from the coat protein mRNA of alfalfa mosaic virus (AMV RNA 4), (Jobling et al., 1987; Tobacco mosaic virus leader (TMV), (Gallie et al., 1989; and Maize Chlorotic Mottle Virus leader (MCMV) (Lommel et al., 1991. See also, Della-Cioppa et al., 1987.

[0510] Regulatory elements such as Adh intron 1 (Callis et al., 1987), sucrose synthase intron (Vasil et al., 1989) or TMV omega element (Gallie, et al., 1989), may further be included where desired.

[0511] Examples of enhancers include elements from the CaMV 35S promoter, octopine synthase genes (Ellis et al., 1987), the rice actin I gene, the maize alcohol dehydrogenase gene (Callis et al., 1987), the maize shrunken I gene (Vasil et al., 1989), TMV omega element (Gallie et al., 1989) and promoters from non-plant eukaryotes (e.g. yeast; Ma et al., 1988).

[0512] Two principal methods for the control of expression are known, viz.: overexpression and underexpression. Overexpression can be achieved by insertion of one or more than one extra copy of the selected gene. It is, however, not unknown for plants or their progeny, originally transformed with one or more than one extra copy of a nucleotide sequence, to exhibit the effects of underexpression as well as overexpression. For underexpression there are two principle methods which are commonly referred to in the art as “antisense downregulation” and “sense downregulation” (sense downregulation is also referred to as “cosuppression”). Generically these processes are referred to as “gene silencing”. Both of these methods lead to an inhibition of expression of the target gene.

[0513] Within the scope of the present invention, the alteration in expression of the nucleic acid molecule of the present invention may be achieved in one of the following ways:

[0514] (1) “Sense” Suppression

[0515] Alteration of the expression of a nucleotide sequence of the present invention, preferably reduction of its expression, is obtained by “sense” suppression (referenced in e.g. Jorgensen et al. (1996) Plant Mol. Biol. 31, 957-973). In this case, the entirety or a portion of a nucleotide sequence of the present invention is comprised in a DNA molecule. The DNA molecule is preferably operatively linked to a promoter functional in a cell comprising the target gene, preferably a plant cell, and introduced into the cell, in which the nucleotide sequence is expressible. The nucleotide sequence is inserted in the DNA molecule in the “sense orientation”, meaning that the coding strand of the nucleotide sequence can be transcribed. In a preferred embodiment, the nucleotide sequence is fully translatable and all the genetic information comprised in the nucleotide sequence, or portion thereof, is translated into a polypeptide. In another preferred embodiment, the nucleotide sequence is partially translatable and a short peptide is translated. In a preferred embodiment, this is achieved by inserting at least one premature stop codon in the nucleotide sequence, which bring translation to a halt. In another more preferred embodiment, the nucleotide sequence is transcribed but no translation product is being made. This is usually achieved by removing the start codon, e.g. the “ATG”, of the polypeptide encoded by the nucleotide sequence. In a further preferred embodiment, the DNA molecule comprising the nucleotide sequence, or a portion thereof, is stably integrated in the genome of the plant cell. In another preferred embodiment, the DNA molecule comprising the nucleotide sequence, or a portion thereof, is comprised in an extrachromosomally replicating molecule. In transgenic plants containing one of the DNA molecules described immediately above, the expression of the nucleotide sequence corresponding to the nucleotide sequence comprised in the DNA molecule is preferably reduced. Preferably, the nucleotide sequence in the DNA molecule is at least 70% identical to the nucleotide sequence the expression of which is reduced, more preferably it is at least 80% identical, yet more preferably at least 90% identical, yet more preferably at least 95% identical, yet more preferably at least 99% identical.

[0516] (2) “Antisense” Suppression

[0517] In another preferred embodiment, the alteration of the expression of a nucleotide sequence of the present invention, preferably the reduction of its expression is obtained by “anti-sense” suppression. The entirety or a portion of a nucleotide sequence of the present invention is comprised in a DNA molecule. The DNA molecule is preferably operatively linked to a promoter functional in a plant cell, and introduced in a plant cell, in which the nucleotide sequence is expressible. The nucleotide sequence is inserted in the DNA molecule in the “anti-sense orientation”, meaning that the reverse complement (also called sometimes noncoding strand) of the nucleotide sequence can be transcribed. In a preferred embodiment, the DNA molecule comprising the nucleotide sequence, or a portion thereof, is stably integrated in the genome of the plant cell. In another preferred embodiment the DNA molecule comprising the nucleotide sequence, or a portion thereof, is comprised in an extrachromosomally replicating molecule. Several publications describing this approach are cited for further illustration (Green, P. J. et al., Ann. Rev. Biochem. 55:569-597 (1986); van der Krol, A. R. et al, Antisense Nuc. Acids & Proteins, pp. 125-141 (1991); Abel, P. P. et al., Proc. Natl. Acad. Sci. USA 86:6949-6952 (1989); Ecker, J. R. et al., Proc. Natl. Acad. Sci. USA 83:5372-5376 (August 1986)).

[0518] In transgenic plants containing one of the DNA molecules described immediately above, the expression of the nucleotide sequence corresponding to the nucleotide sequence comprised in the DNA molecule is preferably reduced. Preferably, the nucleotide sequence in the DNA molecule is at least 70% identical to the nucleotide sequence the expression of which is reduced, more preferably it is at least 80% identical, yet more preferably at least 90% identical, yet more preferably at least 95% identical, yet more preferably at least 99% identical.

[0519] (3) Homologous Recombination

[0520] In another preferred embodiment, at least one genomic copy corresponding to a nucleotide sequence of the present invention is modified in the genome of the plant by homologous recombination as further illustrated in Paszkowski et al., EMBO Journal 7:4021-26 (1988). This technique uses the property of homologous sequences to recognize each other and to exchange nucleotide sequences between each by a process known in the art as homologous recombination. Homologous recombination can occur between the chromosomal copy of a nucleotide sequence in a cell and an incoming copy of the nucleotide sequence introduced in the cell by transformation. Specific modifications are thus accurately introduced in the chromosomal copy of the nucleotide sequence. In one embodiment, the regulatory elements of the nucleotide sequence of the present invention are modified. Such regulatory elements are easily obtainable by screening a genomic library using the nucleotide sequence of the present invention, or a portion thereof, as a probe. The existing regulatory elements are replaced by different regulatory elements, thus altering expression of the nucleotide sequence, or they are mutated or deleted, thus abolishing the expression of the nucleotide sequence. In another embodiment, the nucleotide sequence is modified by deletion of a part of the nucleotide sequence or the entire nucleotide sequence, or by mutation. Expression of a mutated polypeptide in a plant cell is also contemplated in the present invention. More recent refinements of this technique to disrupt endogenous plant genes have been described (Kempin et al., Nature 389:802-803 (1997) and Miao and Lam, Plant J., 7:359-365 (1995).

[0521] In another preferred embodiment, a mutation in the chromosomal copy of a nucleotide sequence is introduced by transforming a cell with a chimeric oligonucleotide composed of a contiguous stretch of RNA and DNA residues in a duplex conformation with double hairpin caps on the ends. An additional feature of the oligonucleotide is for example the presence of 2′-O-methylation at the RNA residues. The RNA/DNA sequence is designed to align with the sequence of a chromosomal copy of a nucleotide sequence of the present invention and to contain the desired nucleotide change. For example, this technique is further illustrated in U.S. Pat. No. 5,501,967 and Zhu et al. (1999) Proc. Natl. Acad. Sci. USA 96: 8768-8773.

[0522] (4) Ribozymes

[0523] In a further embodiment, the RNA coding for a polypeptide of the present invention is cleaved by a catalytic RNA, or ribozyme, specific for such RNA. The ribozyme is expressed in transgenic plants and results in reduced amounts of RNA coding for the polypeptide of the present invention in plant cells, thus leading to reduced amounts of polypeptide accumulated in the cells. This method is further illustrated in U.S. Pat. No. 4,987,071.

[0524] (5) Dominant-Negative Mutants

[0525] In another preferred embodiment, the activity of the polypeptide encoded by the nucleotide sequences of this invention is changed. This is achieved by expression of dominant negative mutants of the proteins in transgenic plants, leading to the loss of activity of the endogenous protein.

[0526] (6) Aptamers

[0527] In a further embodiment, the activity of polypeptide of the present invention is inhibited by expressing in transgenic plants nucleic acid ligands, so-called aptamers, which specifically bind to the protein. Aptamers are preferentially obtained by the SELEX (Systematic Evolution of Ligands by EXponential Enrichment) method. In the SELEX method, a candidate mixture of single stranded nucleic acids having regions of randomized sequence is contacted with the protein and those nucleic acids having an increased affinity to the target are partitioned from the remainder of the candidate mixture. The partitioned nucleic acids are amplified to yield a ligand enriched mixture. After several iterations a nucleic acid with optimal affinity to the polypeptide is obtained and is used for expression in transgenic plants. This method is further illustrated in U.S. Pat. No. 5,270,163.

[0528] (7) Zinc Finger Proteins

[0529] A zinc finger protein that binds a nucleotide sequence of the present invention or to its regulatory region is also used to alter expression of the nucleotide sequence. Preferably, transcription of the nucleotide sequence is reduced or increased. Zinc finger proteins are for example described in Beerli et al. (1998) PNAS 95:14628-14633, or in WO 95/19431, WO 98/54311, or WO 96/06166, all incorporated herein by reference in their entirety.

[0530] (8) dsRNA

[0531] Alteration of the expression of a nucleotide sequence of the present invention is also obtained by dsRNA interference as described for example in WO 99/32619, WO 99/53050 or WO 99/61631, all incorporated herein by reference in their entirety.

[0532] (9) Insertion of a DNA Molecule (Insertional Mutagenesis)

[0533] In another preferred embodiment, a DNA molecule is inserted into a chromosomal copy of a nucleotide sequence of the present invention, or into a regulatory region thereof. Preferably, such DNA molecule comprises a transposable element capable of transposition in a plant cell, such as e.g. Ac/Ds, Em/Spm, mutator. Alternatively, the DNA molecule comprises a T-DNA border of an Agrobacterium T-DNA. The DNA molecule may also comprise a recombinase or integrase recognition site which can be used to remove part of the DNA molecule from the chromosome of the plant cell. An example of this method is set forth in Example 2. Methods of insertional mutagenesis using T-DNA, transposons, oligonucleotides or other methods known to those skilled in the art are also encompassed. Methods of using T-DNA and transposon for insertional mutagenesis are described in Winkler et al. (1989) Methods Mol. Biol. 82:129-136 and Martienssen (1998) PNAS 95:2021-2026, incorporated herein by reference in their entireties.

[0534] (10) Deletion Mutagenesis

[0535] In yet another embodiment, a mutation of a nucleic acid molecule of the present invention is created in the genomic copy of the sequence in the cell or plant by deletion of a portion of the nucleotide sequence or regulator sequence. Methods of deletion mutagenesis are known to those skilled in the art. See, for example, Miao et al, (1995) Plant J. 7:359.

[0536] In yet another embodiment, this deletion is created at random in a large population of plants by chemical mutagenesis or irradiation and a plant with a deletion in a gene of the present invention is isolated by forward or reverse genetics. Irradiation with fast neutrons or gamma rays is known to cause deletion mutations in plants (Silverstone et al, (1998) Plant Cell, 10:155-169; Bruggemann et al., (1996) Plant J., 10:755-760; Redei and Koncz in Methods in Arabidopsis Research, World Scientific Press (1992), pp. 16-82). Deletion mutations in a gene of the present invention can be recovered in a reverse genetics strategy using PCR with pooled sets of genomic DNAs as has been shown in C. elegans (Liu et al., (1999), Genome Research, 9:859-867.). A forward genetics strategy would involve mutagenesis of a line displaying PTGS followed by screening the M2 progeny for the absence of PTGS. Among these mutants would be expected to be some that disrupt a gene of the present invention. This could be assessed by Southern blot or PCR for a gene of the present invention with genomic DNA from these mutants.

[0537] (11) Overexpression in a Plant Cell

[0538] In yet another preferred embodiment, a nucleotide sequence of the present invention encoding a polypeptide comprising a 3′-5′ exonuclease domain and/or activity in a plant cell is overexpressed. Examples of nucleic acid molecules and expression cassettes for overexpression of a nucleic acid molecule of the present invention are described above. Methods known to those skilled in the art of over-expression of nucleic acid molecules are also encompassed by the present invention.

[0539] In still another embodiment, the expression of the nucleotide sequence of the present invention is altered in every cell of a plant. This is for example obtained though homologous recombination or by insertion in the chromosome. This is also for example obtained by expressing a sense or antisense RNA, zinc finger protein or ribozyme under the control of a promoter capable of expressing the sense or antisense RNA, zinc finger protein or ribozyme in every cell of a plant. Constitutive expression, inducible, tissue-specific or developmentally-regulated expression are also within the scope of the present invention and result in a constitutive, inducible, tissue-specific or developmentally-regulated alteration of the expression of a nucleotide sequence of the present invention in the plant cell. Constructs for expression of the sense or antisense RNA, zinc finger protein or ribozyme, or for overexpression of a nucleotide sequence of the present invention, are prepared and transformed into a plant cell according to the teachings of the present invention, e.g. as described infra.

[0540] The invention hence also provides sense and anti-sense nucleic acid molecules corresponding to the open reading flames identified in the SEQ ID NOs of the Sequence Listing as well as their orthologs.

[0541] The genes and open reading frames according to the present invention which are substantially similar to a nucleotide sequence encoding a polypeptide as given in any one of the SEQ ID NOs of the Sequence Lisiting including any corresponding antisense constructs can be operably linked to any promoter that is functional within the plant host including the promoter sequences according to the invention or mutants thereof.

[0542] The present invention further provides a method of augmenting a plant genome by contacting plant cells with a nucleic acid molecule of the invention, e.g., one having a nucleotide sequence that directs tissue-specific, tissue-preferential transcription of a linked nucleic acid segment isolatable or obtained from a plant gene encoding a polypeptide that is substantially similar to a polypeptide encoded by the an Oryza gene having a sequence according to any one of SEQ ID NOs provided in the Sequence Listing so as to yield transformed plant cells; and regenerating the transformed plant cells to provide a differentiated transformed plant, wherein the differentiated transformed plant expresses the nucleic acid molecule in the cells of the plant, preferably in the appropriate tissues of the plant grain. The nucleic acid molecule may be present in the nucleus, chloroplast, mitochondria and/or plastid of the cells of the plant.

[0543] Plant species may be transformed with the DNA construct of the present invention by the DNA-mediated transformation of plant cell protoplasts and subsequent regeneration of the plant from the transformed protoplasts in accordance with procedures well known in the art.

[0544] Any plant tissue capable of subsequent clonal propagation, whether by organogenesis or embryogenesis, may be transformed with a vector of the present invention. The term “organogenesis,” as used herein, means a process by which shoots and roots are developed sequentially from meristematic centers; the term “embryogenesis,” as used herein, means a process by which shoots and roots develop together in a concerted fashion (not sequentially), whether from somatic cells or gametes. The particular tissue chosen will vary depending on the clonal propagation systems available for, and best suited to, the particular species being transformed. Exemplary tissue targets include leaf disks, pollen, embryos, cotyledons, hypocotyls, megagametophytes, callus tissue, existing meristematic tissue (e.g., apical meristems, axillary buds, and root meristems), and induced meristem tissue (e.g., cotyledon meristem and ultilane meristem).

[0545] Plants of the present invention may take a variety of forms. The plants may be chimeras of transformed cells and nor-transformed cells; the plants may be clonal transformants (e.g., all cells transformed to contain the expression cassette); the plants may comprise grafts of transformed and untransformed tissues (e.g., a transformed root stock grafted to an untransformed scion in citrus species). The transformed plants may be propagated by a variety of means, such as by clonal propagation or classical breeding techniques. For example, first generation (or T1) transformed plants may be selfed to give homozygous second generation (or T2) transformed plants, and the T2 plants further propagated through classical breeding techniques. A dominant selectable marker (such as npt II) can be associated with the expression cassette to assist in breeding.

[0546] Thus, the present invention provides a transformed (transgenic) plant cell in planta or ex planta, including a transformed plastid or other organelle, e.g., nucleus, mitochondria or chloroplast. The present invention may be used for transformation of any plant species, including, but not limited to, cells from corn (Zea mays), Brassica sp. (e.g., B. napus, B. rapa, B. juncea), particularly those Brassica species useful as sources of seed oil, alfalfa (Medicago sativa), rice (Oryza sativa), rye (Secale cereale), sorghum (Sorghum bicolor, Sorghum vulgare), millet (e.g., pearl millet (Pennisetum glaucum), proso millet (Panicum miliaceum), foxtail millet (Setaria italica), finger millet (Eleusine coracana)), sunflower (Helianthus annuus), safflower (Carthamus tinctorius), wheat (Triticum aestivum), soybean (Glycine max), tobacco (Nicotiana tabacum), potato (Solanum tuberosum), peanuts (Arachis hypogaea), cotton (Gossypium barbadense, Gossypium hirsutum), sweet potato (Ipomoea batatus), cassaya (Manihot esculenta), coffee (Cofea spp.), coconut (Cocos nucifera), pineapple (Ananas comosus), citrus trees (Citrus spp.), cocoa (Theobroma cacao), tea (Camellia sinensis), banana (Musa spp.), avocado (Persea ultilane), fig (Ficus casica), guava (Psidium guajava), mango (Mangifera indica), olive (Olea europaea), papaya (Carica papaya), cashew (Anacardium occidentale), macadamia (Macadamia integrifolia), almond (Prunus amygdalus), sugar beets (Beta vulgaris), sugarcane (Saccharum spp.), oats, duckweed (Lemna), barley, vegetables, ornamentals, and conifers.

[0547] Duckweed (Lemna, see WO 00/07210) includes members of the family Lemnaceae. There are known four genera and 34 species of duckweed as follows: genus Lemna (L. aequinoctialis, L. disperma, L. ecuadoriensis, L. gibba, L. japonica, L. minor, L. miniscula, L. obscura, L. perpusilla, L. tenera, L. trisulca, L.turionifera, L. valdiviana); genus Spirodela (S. intermedia, S. polyrrhiza, S. punctata); genus Woffia (Wa. Angusta, Wa. Arrhiza, Wa. Australina, Wa. Borealis, Wa. Brasiliensis, Wa. Columbiana, Wa. Elongata, Wa. Globosa, Wa. Microscopica, Wa. Neglecta) and genus Wofiella (Wl. ultila, Wl. ultilanen, Wl. gladiala, Wl. ultila, Wl. lingulata, Wl. repunda, Wl. rotunda, and Wl. neotropica). Any other genera or species of Lemnaceae, if they exist, are also aspects of the present invention. Lemna gibba, Lemnaminor, and Lemna miniscula are preferred, with Lemnaminor and Lemna miniscula being most preferred. Lemna species can be classified using the taxonomic scheme described by Landolt, Biosystematic Investigation on the Family of Duckweeds: The family of Lemnaceae—A Monograph Study. Geobatanischen Institut ETH, Stiflung Rubel, Zurich (1986)).

[0548] Vegetables within the scope of the invention include tomatoes (Lycopersicon esculentum), lettuce (e.g., Lactuca sativa), green beans (Phaseolus vulgaris), lima beans (Phaseolus limensis), peas (Lathyrus spp.), and members of the genus Cucumis such as cucumber (C. sativus), cantaloupe (C. cantalupensis), and musk melon (C. melo). Ornamentals include azalea (Rhododendron spp.), hydrangea (Macrophylla hydrangea), hibiscus (Hibiscus rosasanensis), roses (Rosa spp.), tulips (Tulipa spp.), daffodils (Narcissus spp.), petunias (Petunia hybrida), carnation (Dianthus caryophyllus), poinsettia (Euphorbia pulcherrima), and chrysanthemum. Conifers that may be employed in practicing the present invention include, for example, pines such as loblolly pine (Pinus taeda), slash pine (Pinus elliotii), ponderosa pine (Pinus ponderosa), lodgepole pine (Pinus contorta), and Monterey pine (Pinus radiata), Douglas-fir (Pseudotsuga menziesii); Western hemlock (Tsuga ultilane); Sitka spruce (Picea glauca); redwood (Sequoia sempervirens); true firs such as silver fir (Abies amabilis) and balsam fir (Abies balsamea); and cedars such as Western red cedar (Thuja plicata) and Alaska yellow-cedar (Chamaecyparis nootkatensis). Leguminous plants include beans and peas. Beans include guar, locust bean, fenugreek, soybean, garden beans, cowpea, mungbean, lima bean, fava bean, lentils, chickpea, etc. Legumes include, but are not limited to, Arachis, e.g., peanuts, Vicia, e.g., crown vetch, hairy vetch, adzuki bean, mung bean, and chickpea, Lupinus, e.g., lupine, trifolium, Phaseolus, e.g., common bean and lima bean, Pisum, e.g., field bean, Melilotus, e.g., clover, Medicago, e.g., alfalfa, Lotus, e.g., trefoil, lens, e.g., lentil, and false indigo. Preferred forage and turf grass for use in the methods of the invention include alfalfa, orchard grass, tall fescue, perennial ryegrass, creeping bent grass, and redtop.

[0549] Other plants within the scope of the invention include Acacia, aneth, artichoke, arugula, blackberry, canola, cilantro, clementines, escarole, eucalyptus, fennel, grapefruit, honey dew, jicama, kiwifruit, lemon, lime, mushroom, nut, okra, orange, parsley, persimmon, plantain, pomegranate, poplar, radiata pine, radicchio, Southern pine, sweetgum, tangerine, triticale, vine, yams, apple, pear, quince, cherry, apricot, melon, hemp, buckwheat, grape, raspberry, chenopodium, blueberry, nectarine, peach, plum, strawberry, watermelon, eggplant, pepper, cauliflower, Brassica, e.g., broccoli, cabbage, ultilan sprouts, onion, carrot, leek, beet, broad bean, celery, radish, pumpkin, endive, gourd, garlic, snapbean, spinach, squash, turnip, ultilane, and zucchini.

[0550] Ornamental plants within the scope of the invention include impatiens, Begonia, Pelargonium, Viola, Cyclamen, Verbena, Vinca, Tagetes, Primula, Saint Paulia, Agertum, Amaranthus, Antihirrhinum, Aquilegia, Cineraria, Clover, Cosmo, Cowpea, Dahlia, Datura, Delphinium, Gerbera, Gladiolus, Gloxinia, Hippeastrum, Mesembryanthemum, Salpiglossos, and Zinnia. Other plants within the scope of the invention are shown in Table 1 (above).

[0551] Preferably, transgenic plants of the present invention are crop plants and in particular cereals (for example, corn, alfalfa, sunflower, rice, Brassica, canola, soybean, barley, soybean, sugarbeet, to cotton, safflower, peanut, sorghum, wheat, millet, tobacco, etc.), and even more preferably corn, rice and soybean.

[0552] The present invention also provides a transgenic plant prepared by this method, a seed from such a plant and progeny plants from such a plant including hybrids and inbreds. Preferred transgenic plants are transgenic maize, soybean, barley, alfalfa, sunflower, canola, soybean, cotton, peanut, sorghum, tobacco, sugarbeet, rice, wheat, rye, turfgrass, millet, sugarcane, tomato, or potato.

[0553] A transformed (transgenic) plant of the invention includes plants, the genome of which is augmented by a nucleic acid molecule of the invention, or in which the corresponding gene has been disrupted, e.g., to result in a loss, a decrease or an alteration, in the function of the product encoded by the gene, which plant may also have increased yields and/or produce a better-quality product than the corresponding wild-type plant. The nucleic acid molecules of the invention are thus useful for targeted gene disruption, as well as markers and probes.

[0554] The invention also provides a method of plant breeding, e.g., to prepare a crossed fertile transgenic plant. The method comprises crossing a fertile transgenic plant comprising a particular nucleic acid molecule of the invention with itself or with a second plant, e.g., one lacking the particular nucleic acid molecule, to prepare the seed of a crossed fertile transgenic plant comprising the particular nucleic acid molecule. The seed is then planted to obtain a crossed fertile transgenic plant. The plant may be a monocot or a dicot. In a particular embodiment, the plant is a cereal plant.

[0555] The crossed fertile transgenic plant may have the particular nucleic acid molecule inherited through a female parent or through a male parent. The second plant may be an inbred plant. The crossed fertile transgenic may be a hybrid. Also included within the present invention are seeds of any of these crossed fertile transgenic plants.

[0556] Transformation of plants can be undertaken with a single DNA molecule or multiple DNA molecules (i.e., co-transformation), and both these techniques are suitable for use with the expression cassettes of the present invention. Numerous transformation vectors are available for plant transformation, and the expression cassettes of this invention can be used in conjunction with any such vectors. The selection of vector will depend upon the preferred transformation technique and the target species for transformation.

[0557] A variety of techniques are available and known to those skilled in the art for introduction of constructs into a plant cell host. These techniques generally include transformation with DNA employing A. tumefaciens or A. rhizogenes as the transforming agent, liposomes, PEG precipitation, electroporation, DNA injection, direct DNA uptake, microprojectile bombardment, particle acceleration, and the like (See, for example, EP 295959 and EP 138341) (see below). However, cells other than plant cells may be transformed with the expression cassettes of the invention. The general descriptions of plant expression vectors and reporter genes, and Agrobacterium and Agrobacterium-mediated gene transfer, can be found in Gruber et al. (1993).

[0558] Expression vectors containing genomic or synthetic fragments can be introduced into protoplasts or into intact tissues or isolated cells. Preferably expression vectors are introduced into intact tissue. General methods of culturing plant tissues are provided for example by Maki et al., (1993); and by Phillips et al. (1988). Preferably, expression vectors are introduced into maize or other plant tissues using a direct gene transfer method such as microprojectile-mediated delivery, DNA injection, electroporation and the like. More preferably expression vectors are introduced into plant tissues using the microprojectile media delivery with the biolistic device. See, for example, Tomes et al. (1995). The vectors of the invention can not only be used for expression of structural genes but may also be used in exon-trap cloning, or promoter trap procedures to detect differential gene expression in varieties of tissues, (Lindsey et al., 1993; Auch & Reth et al.).

[0559] It is particularly preferred to use the binary type vectors of Ti and Ri plasmids of Agrobacterium spp. Ti-derived vectors transform a wide variety of higher plants, including monocotyledonous and dicotyledonous plants, such as soybean, cotton, rape, tobacco, and rice (Pacciotti et al., 1985: Byrne et al., 1987; Sukhapinda et al., 1987; Lorz et al., 1985; Potrykus, 1985; Park et al., 1985: Hiei et al., 1994). The use of T-DNA to transform plant cells has received extensive study and is amply described (EP 120516; Hoekema, 1985; Knauf, et al., 1983; and An et al., 1985). For introduction into plants, the chimeric genes of the invention can be inserted into binary vectors as described in the examples.

[0560] Other transformation methods are available to those skilled in the art, such as direct uptake of foreign DNA constructs (see EP 295959), techniques of electroporation (Fromm et al., 1986) or high velocity ballistic bombardment with metal particles coated with the nucleic acid constructs (Kine et al., 1987, and U.S. Pat. No. 4,945,050). Once transformed, the cells can be regenerated by those skilled in the art. Of particular relevance are the recently described methods to transform foreign genes into commercially important crops, such as rapeseed (De Block et al., 1989), sunflower (Everett et al., 1987), soybean (McCabe et al., 1988; Hinchee et al., 1988; Chee et al., 1989; Christou et al., 1989; EP 301749), rice (Hiei et al., 1994), and corn (Gordon Kamm et al., 1990; Fromm et al., 1990).

[0561] Those skilled in the art will appreciate that the choice of method might depend on the type of plant, i.e., monocotyledonous or dicotyledonous, targeted for transformation. Suitable methods of transforming plant cells include, but are not limited to, microinjection (Crossway et al., 1986), electroporation (Riggs et al., 1986), Agrobacterium-mediated transformation (Hinchee et al., 1988), direct gene transfer (Paszkowski et al., 1984), and ballistic particle acceleration using devices available from Agracetus, Inc., Madison, Wis. And BioRad, Hercules, Calif. (see, for example, Sanford et al., U.S. Pat. No. 4,945,050; and McCabe et al., 1988). Also see, Weissinger et al., 1988; Sanford et al., 1987 (onion); Christou et al., 1988 (soybean); McCabe et al., 1988 (soybean); Datta et al., 1990 (rice); Klein et al., 1988 (maize); Klein et al., 1988 (maize); Klein et al., 1988 (maize); Fromm et al., 1990 (maize); and Gordon-Kamm et al., 1990 (maize); Svab et al., 1990 (tobacco chloroplast); Koziel et al., 1993 (maize); Shimamoto et al., 1989 (rice); Christou et al., 1991 (rice); European Patent Application EP 0 332 581 (orchardgrass and other Pooideae); Vasil et al., 1993 (wheat); Weeks et al., 1993 (wheat). In one embodiment, the protoplast transformation method for maize is employed (European Patent Application EP 0 292 435, U.S. Pat. No. 5,350,689).

[0562] In another embodiment, a nucleotide sequence of the present invention is directly transformed into the plastid genome. Plastid transformation technology is extensively described in U.S. Pat. Nos. 5,451,513, 5,545,817, and 5,545,818, in PCT application no. WO 95/16783, and in McBride et al., 1994. The basic technique for chloroplast transformation involves introducing regions of cloned plastid DNA flanking a selectable marker together with the gene of interest into a suitable target tissue, e.g., using biolistics or protoplast transformation (e.g., calcium chloride or PEG mediated transformation). The 1 to 1.5 kb flanking regions, termed targeting sequences, facilitate orthologous recombination with the plastid genome and thus allow the replacement or modification of specific regions of the plastome. Initially, point mutations in the chloroplast 16S rRNA and rps12 genes conferring resistance to spectinomycin and/or streptomycin are utilized as selectable markers for transformation (Svab et al., 1990; Staub et al., 1992). This resulted in stable homoplasmic as transformants at a frequency of approximately one per 100 bombardments of target leaves. The presence of cloning sites between these markers allowed creation of a plastid targeting vector for introduction of foreign genes (Staub et al., 1993). Substantial increases in transformation frequency are obtained by replacement of the recessive rRNA or r-protein antibiotic resistance genes with a dominant selectable marker, the bacterial aadA gene encoding the spectinomycin-detoxifying enzyme aminoglycoside-3N-adenyltransferase (Svab et al., 1993). Other selectable markers useful for plastid transformation are known in the art and encompassed within the scope of the invention. Typically, approximately 15-20 cell division cycles following transformation are required to reach a homoplastidic state. Plastid expression, in which genes are inserted by orthologous recombination into all of the several thousand copies of the circular plastid genome present in each plant cell, takes advantage of the enormous copy number advantage over nuclear-expressed genes to permit expression levels that can readily exceed 10% of the total soluble plant protein. In a preferred embodiment, a nucleotide sequence of the present invention is inserted into a plastid targeting vector and transformed into the plastid genome of a desired plant host. Plants homoplastic for plastid genomes containing a nucleotide sequence of the present invention are obtained, and are preferentially capable of high expression of the nucleotide sequence.

[0563] Agrobacterium tumefaciens cells containing a vector comprising an expression cassette of the present invention, wherein the vector comprises a Ti plasmid, are useful in methods of making transformed plants. Plant cells are infected with an Agrobacterium tumefaciens as described above to produce a transformed plant cell, and then a plant is regenerated from the transformed plant cell. Numerous Agrobacterium vector systems useful in carrying out the present invention are known.

[0564] For example, vectors are available for transformation using Agrobacterium tumefaciens. These typically carry at least one T-DNA border sequence and include vectors such as pBIN19 (Bevan, 1984). In one preferred embodiment, the expression cassettes of the present invention may be inserted into either of the binary vectors pCIB200 and pCIB2001 for use with Agrobacterium. These vector cassettes for Agrobacterium-mediated transformation wear constructed in the following manner. PTJS75kan was created by Narl digestion of pTJS75 (Schmidhauser & Helinski, 1985) allowing excision of the tetracycline-resistance gene, followed by insertion of an Accl fragment from pUC4K carrying an NPTh (Messing & Vierra, 1982; Bevan et al., 1983; McBride et al., 1990). XhoI linkers were ligated to the EcoRV fragment of pCIB7 which contains the left and right T-DNA borders, a plant selectable nos/nptII chimeric gene and the pUC polylinker (Rothstein et al., 1987), and the XhoI-digested fragment was cloned into SalI-digested pTJS75kan to create pCIB200 (see also EP 0 332 104, example 19). PCIB200 contains the following unique polylinker restriction sites: EcoRI, SstI, KpnI, BgfII, XbaI, and SalI. The plasmid pCIB2001 is a derivative of pCIB200 which was created by the insertion into the polylinker of additional restriction sites. Unique restriction sites in the polylinker of pCIB2001 are EcoRI, SstI, KpnI, BglII, XbaI, SalI, MluI, BclI, AvrII, ApaI, HpaI, and StuI. PCIB2001, in addition to containing these unique restriction sites also has plant and bacterial kanamycin selection, left and right T-DNA borders for Agrobacterium-mediated transformation, the RK2-derived trfA function for mobilization between E. coli and other hosts, and the OnT and OriV functions also from RK2. The pCIB2001 polylinker is suitable for the cloning of plant expression cassettes containing their own regulatory signals.

[0565] An additional vector useful for Agrobacterium-mediated transformation is the binary vector pCIB 10, which contains a gene encoding kanamycin resistance for selection in plants, T-DNA right and left border sequences and incorporates sequences from the wide host-range plasmid pRK252 allowing it to replicate in both E. coli and Agrobacterium. Its construction is described by Rothstein et al., 1987. Various derivatives of pCIB10 have been constructed which incorporate the gene for hygromycin B phosphotransferase described by Gritz et al., 1983. These derivatives enable selection of transgenic plant cells on hygromycin only (pCIB743), or hygromycin and kananycin (pCIB715, pCIB717).

[0566] Methods using either a form of direct gene transfer or Agrobacterium-mediated transfer usually, but not necessarily, are undertaken with a selectable marker which may provide resistance to an antibiotic (e.g., kanamycin, hygromycin or methotrexate) or a herbicide (e.g., phosphinothricin). The choice of selectable marker for plant transformation is not, however, critical to the invention.

[0567] For certain plant species, different antibiotic or herbicide selection markers may be preferred. Selection markers used routinely in transformation include the nptlI gene which confers resistance to kanamycin and related antibiotics (Messing & Vierra, 1982; Bevan et al., 1983), the bar gene which confers resistance to the herbicide phosphinothricin (White et al., 1990, Spencer et al., 1990), the hph gene which confers resistance to the antibiotic hygromycin (Blochinger & Diggelmann), and the dhfr gene, which confers resistance to methotrexate (Bourouis et al., 1983).

[0568] Selection markers resulting in positive selection, such as a phosphomannose isomerase gene, as described in patent application WO 93/05163, are also used. Other genes to be used for positive selection are described in WO 94/20627 and encode xyloisomerases and phosphomanno-isomerases such as mannose-6-phosphate isomerase and mannose-1-phosphate isomerase; phosphomanno mutase; mannose epimerases such as those which convert carbohydrates to mannose or mannose to carbohydrates such as glucose or galactose; phosphatases such as mannose or xylose phosphatase, mannose-6-phosphatase and mannose-1-phosphatase, and permeases which are involved in the transport of mannose, or a derivative, or a precursor thereof into the cell. The agent which reduces the toxicity of the compound to the cells is typically a glucose derivative such as methyl-3-O-glucose or phloridzin. Transformed cells are identified without damaging or killing the non-transformed cells in the population and without co-introduction of antibiotic or herbicide resistance genes. As described in WO 93/05163, in addition to the fact that the need for antibiotic or herbicide resistance genes is eliminated, it has been shown that the positive selection method is often far more efficient than traditional negative selection.

[0569] One vector useful for direct gene transfer techniques in combination with selection by the herbicide Basta (or phosphinothricin) is pCIB3064. This vector is based on the plasmid pCIB246, which comprises the CaMV 35S promoter in operational fusion to the E. coli GUS gene and the CaMV 35S transcriptional terminator and is described in the PCT published application WO 93/07278, herein incorporated by reference. One gene useful for conferring resistance to phosphinothricin is the bar gene from Streptomyces viridochromogenes (Thompson et al., 1987). This vector is suitable for the cloning of plant expression cassettes containing their own regulatory signals.

[0570] An additional transformation vector is pSOG35 which utilizes the E. coli gene dihydrofolate reductase (DHFR) as a selectable marker conferring resistance to methotrexate. PCR was used to amplify the 35S promoter (about 800 bp), intron 6 from the maize Adh1 gene (about 550 bp) and 18 bp of the GUS untranslated leader sequence from pSOG10. A 250 bp fragment encoding the E. coli dihydrofolate reductase type II gene was also amplified by PCR and these two PCR fragments were assembled with a SacI-PstI fragment from pB1221 (Clontech) which comprised the pUC19 vector backbone and the nopaline synthase terminator. Assembly of these fragments generated pSOG19 which contains the 35S promoter in fusion with the intron 6 sequence, the GUS leader, the DHFR gene and the nopaline synthase terminator. Replacement of the GUS leader in pSOG19 with the leader sequence from Maize Chlorotic Mottle Virus check (MCMV) generated the vector pSOG35. pSOG19 and pSOG35 carry the pUC-derived gene for ampicillin resistance and have HindIII, SphI, PstI and EcoRI sites available for the cloning of foreign sequences.

[0571] Binary backbone vector pNOV2117 contains the T-DNA portion flanked by the right and left border sequences, and including the Positcch™ (Syngenta) plant selectable marker and the “grain filling candidate gene” gene expression cassette. The Positech™ plant selectable marker confers resistance to mannose and in this instance consists of the maize ubiquitin promoter driving expression of the PMI (phosphomannose isomerase) gene, followed by the cauliflower mosaic virus transcriptional terminator.

[0572] Transgenic plant cells are then placed in an appropriate selective medium for selection of transgenic cells which are then grown to callus. Shoots are grown from callus and plantlets generated from the shoot by growing in rooting medium. The various constructs normally will be joined to a marker for selection in plant cells. Conveniently, the marker may be resistance to a biocide (particularly an antibiotic, such as kanamycin, G418, bleomycin, hygromycin, chloramphenicol, herbicide, or the like). The particular marker used will allow for selection of transformed cells as compared to cells lacking the DNA which has been introduced. Components of DNA constructs including transcription cassettes of this invention may be prepared from sequences which are native (endogenous) or foreign (exogenous) to the host. By “foreign” it is meant that the sequence is not found in the wild-type host into which the construct is introduced. Heterologous constructs will contain at least one region which is not native to the gene from which the transcription-initiation-region is derived.

[0573] To confirm the presence of the transgenes in transgenic cells and plants, a variety of assays may be performed. Such assays include, for example, “molecular biological” assays well known to those of skill in the art, such as Southern and Northern blotting, in situ hybridization and nucleic acid-based amplification methods such as PCR or RT-PCR; “biochemical” assays, such as detecting the presence of a protein product, e.g., by immunological means (ELISAs and Western blots) or by enzymatic function; plant part assays, such as seed assays; and also, by analyzing the phenotype of the whole regenerated plant, e.g., for disease or pest resistance.

[0574] DNA may be isolated from cell lines or any plant parts to determine the presence of the preselected nucleic acid segment through the use of techniques well known to those skilled in the art. Note that intact sequences will not always be present, presumably due to rearrangement or deletion of sequences in the cell.

[0575] The presence of nucleic acid elements introduced through the methods of this invention may be determined by polymerase chain reaction (PCR). Using this technique discreet fragments of nucleic acid are amplified and detected by gel electrophoresis. This type of analysis permits one to determine whether a preselected nucleic acid segment is present in a stable transformant, but does not prove integration of the introduced preselected nucleic acid segment into the host cell genome. In addition, it is not possible using PCR techniques to determine whether transformants have exogenous genes introduced into different sites in the genome, i.e., whether transformants are of independent origin. It is contemplated that using PCR techniques it would be possible to clone fragments of the host genomic DNA adjacent to an introduced preselected DNA segment.

[0576] Positive proof of DNA integration into the host genome and the independent identities of transformants may be determined using the technique of Southern hybridization. Using this technique specific DNA sequences that were introduced into the host genome and flanking host DNA sequences can be identified. Hence the Southern hybridization pattern of a given transformant serves as an identifying characteristic of that transformant. In addition it is possible through Southern hybridization to demonstrate the presence of introduced preselected DNA segments in high molecular weight DNA, i.e., confirm that the introduced preselected DNA segment has been integrated into the host cell genome. The technique of Southern hybridization provides information that is obtained using PCR, e.g., the presence of a preselected DNA segment, but also demonstrates integration into the genome and characterizes each individual transformant.

[0577] It is contemplated that using the techniques of dot or slot blot hybridization which are modifications of Southern hybridization techniques one could obtain the same information that is derived from PCR, e.g., the presence of a preselected DNA segment.

[0578] Both PCR and Southern hybridization techniques can be used to demonstrate transmission of a preselected DNA segment to progeny. In most instances the characteristic Southern hybridization pattern for a given transformant will segregate in progeny as one or more Mendelian genes (Spencer et al., 1992); Laursen et al., 1994) indicating stable inheritance of the gene. The nonchimeric nature of the callus and the parental transformants (R₀) was suggested by germline transmission and the identical Southern blot hybridization patterns and intensities of the transforming DNA in callus, R₀ plants and R₁ progeny that segregated for the transformed gene.

[0579] Whereas DNA analysis techniques may be conducted using DNA isolated from any part of a plant, RNA may only be expressed in particular cells or tissue types and hence it will be necessary to prepare RNA for analysis from these tissues. PCR techniques may also be used for detection and quantitation of RNA produced from introduced preselected DNA segments. In this application of PCR it is first necessary to reverse transcribe RNA into DNA, using enzymes such as reverse transcriptase, and then through the use of conventional PCR techniques amplify the DNA. In most instances PCR techniques, while useful, will not demonstrate integrity of the RNA product. Further information about the nature of the RNA product may be obtained by Northern blotting. This technique will demonstrate the presence of an RNA species and give information about the integrity of that RNA. The presence or absence of an RNA species can also be determined using dot or slot blot Northern hybridizations. These techniques are modifications of Northern blotting and will only demonstrate the presence or absence of an RNA species.

[0580] While Southern blotting and PCR may be used to detect the preselected DNA segment in question, they do not provide information as to whether the preselected DNA segment is being expressed. Expression may be evaluated by specifically identifying the protein products of the introduced preselected DNA segments or evaluating the phenotypic changes brought about by their expression.

[0581] Assays for the production and identification of specific proteins may make use of physical chemical, structural, functional, or other properties of the proteins. Unique physicachemical or structural properties allow the proteins to be separated and identified by electrophoretic procedures, such as native or denaturing gel electrophoresis or isoelectric focusing, or by chromatographic techniques such as ion exchange or gel exclusion chromatography. The unique structures of individual proteins offer opportunities for use of specific antibodies to detect their presence in formats such as an ELISA assay. Combinations of approaches may be employed with even greater specificity such as Western blotting in which antibodies are used to locate individual gene products that have been separated by electrophoretic techniques. Additional techniques may be employed to absolutely confirm the identity of the product of interest such as evaluation by amino acid sequencing following purification. Although these are among the most commonly employed, other procedures may be additionally used.

[0582] Assay procedures may also be used to identify the expression of proteins by their functionality, especially the ability of enzymes to catalyze specific chemical reactions involving specific substrates and products. These reactions may be followed by providing and quantifying the loss of substrates or the generation of products of the reactions by physical or chemical procedures. Examples are as varied as the enzyme to be analyzed.

[0583] Very frequently the expression of a gene product is determined by evaluating the phenotypic results of its expression. These assays also may take many forms including but not limited to analyzing changes in the chemical composition, morphology, or physiological properties of the plant. Morphological changes may include greater stature or thicker stalks. Most often changes in response of plants or plant parts to imposed treatments are evaluated under carefully controlled conditions termed bioassays.

[0584] The compositions of the invention include plant nucleic acid molecules, and the amino acid sequences for the polypeptides or partial-length polypeptides encoded by the nucleic acid molecule which comprises an open reading frame. These sequences can be employed to alter expression of a particular gene corresponding to the open reading frame by decreasing or eliminating expression of that plant gene or by overexpressing a particular gene product. Methods of this embodiment of the invention include stably transforming a plant with the nucleic acid molecule of the invention which includes an open reading frame operably linked to a promoter capable of driving expression of that open reading frame (sense or antisense) in a plant cell. By “portion” or “fragment”, as it relates to a nucleic acid molecule which comprises an open reading frame or a fragment thereof encoding a partial-length polypeptide having the activity of the full length polypeptide, is meant a sequence having at least 80 nucleotides, more preferably at least 150 nucleotides, and still more preferably at least 400 nucleotides. If not employed for expressing, a “portion” or “fragment” means at least 9, preferably 12, more preferably 15, even more preferably at least 20, consecutive nucleotides, e.g., probes and primers (oligonucleotides), corresponding to the nucleotide sequence of the nucleic acid molecules of the invention. Thus, to express a particular gene product, the method comprises introducing to a plant, plant cell, or plant tissue an expression cassette comprising a promoter linked to an open reading frame so as to yield a transformed differentiated plant, transformed cell or transformed tissue. Transformed cells or tissue can be regenerated to provide a transformed differentiated plant. The transformed differentiated plant or cells thereof preferably expresses the open reading frame in an amount that alters the amount of the gene product in the plant or cells thereof, which product is encoded by the open reading frame. The present invention also provides a transformed plant prepared by the method, progeny and seed thereof.

[0585] The invention further includes a nucleotide sequence which is complementary to one (hereinafter “test” sequence) which hybridizes under stringent conditions with a nucleic acid molecule of the invention as well as RNA which is transcribed from the nucleic acid molecule. When the hybridization is performed under stringent conditions, either the test or nucleic acid molecule of invention is preferably supported, e.g., on a membrane or DNA chip. Thus, either a denatured test or nucleic acid molecule of the invention is preferably first bound to a support and hybridization is effected for a specified period of time at a temperature of, e.g., between 55 and 70° C., in double strength citrate buffered saline (SC) containing 0.1% SDS followed by rinsing of the support at the same temperature but with a buffer having a reduced SC concentration. Depending upon the degree to of stringency required such reduced concentration buffers are typically single strength SC containing 0.1% SDS, half strength SC containing 0.1% SDS and one-tenth strength SC containing 0.1% SDS.

[0586] In a further embodiment, the present invention provides a transformed plant host cell, or one obtained through breeding, capable of over-expressing, under-expressing, or having a knock out of amino acid genes and/or their gene products. The plant cell is transformed with at least one such expression vector wherein the plant host cell can be used to regenerate plant tissue or an entire plant, or seed there from, in which the effects of expression, including overexpression or underexpression, of the introduced sequence or sequences can be measured in vitro or in planta.

[0587] Polynucleotides derived from the nucleic acid molecules of the present invention having any of the nucleotide sequences of SEQ ID NO: 1 to 461 and 501 to 511, respectively, encoding a polypeptide the expression of which is up-regulated during grain filling, are useful to detect the presence in a test sample of at least one copy of a nucleotide sequence containing the same or substantially the same sequence, or a fragment, complement, or variant thereof. The sequence of the probes and/or primers of the instant invention need not be identical to those provided in the Sequence Listing or the complements thereof. Some variation in probe or primer sequence and/or length can allow additional family members to be detected, as well as orthologous genes and more taxonomically distant related sequences. Similarly probes and/or primers of the invention can include additional nucleotides that serve as a label for detecting duplexes, for isolation of duplexed polynucleotides, or for cloning purposes.

[0588] Preferred probes and primers of the invention include isolated, purified, or recombinant polynucleotides containing a contiguous span of between at least 12 to at least 1000 nucleotides of any nucleotid sequence which is substantially similar, and preferably has at least between 70% and 99% sequence identity to any one of SEQ ID NO: 1 to 461, 501-511, and 513-641, respectively, encoding a polypeptide the expression of which is up-regulated during grain filing, or the complements thereof, with each individual number of nucleotides within this range also being part of the invention. Preferred are isolated, purified, or recombinant polynucleotides containing a contiguous span of at least 12, 15, 18, 20, 25, 30, 35, 40, 50, 60, 70, 80, 90, 100, 150, 200, 300, 400, 500, 750, or 1000 nucleotides of any nucleotide sequence which is substantially similar, and preferably has at least between 70% and 99%, sequence identity to any one of SEQ ID NO: 1 to 461, 501-511, and 513-641, respectively, encoding a polypeptide the expression of which is up-regulated during grain filling, or the complements thereof. The appropriate length for primers and probes will vary depending on the application. For use as PCR primers, probes are 12-40 nucleotides, preferably 18-30 nucleotides long. For use in mapping, probes are 50 to 500 nucleotides, preferably 100-250 nucleotides long. For use in Southern hybridizations, probes as long as several kilobases can be used. The appropriate length for primers and probes under a particular set of assay conditions may be empirically determined by one of skill in the art.

[0589] The primers and probes can be prepared by any suitable method, including, for example, cloning and restriction of appropriate sequences and direct chemical synthesis by a method such as the phosphodiester method of Narang et al. (Meth Enzymol 68: 90 (1979)), the diethylphosphoramidite method, the triester method of Matteucci et al. (J Am Chem Soc 103: 3185 (1981)), or according to Urdea et al. (Proc Natl Acad 80: 7461 (1981)), the solid support method described in EP 0 707 592, or using commercially available automated oligonucleotide synthesizers.

[0590] Detection probes are generally nucleotide sequences or uncharged nucleotide analogs such as, for example peptide nucleotides which are disclosed in International Patent Application WO 92/20702, morpholino analogs which are described in U.S. Pat. Nos. 5,185,444, 5,034,506 and 5,142,047. The probe may have to be rendered “non-extendable” such that additional dNTPs cannot be added to the probe. Analogs are usually nonextendable, and nucleotide probes can be rendered non-extendable by modifying the 3′ end of the probe such that the hydroxyl group is no longer capable of participating in elongation. For example, the 3′ end of the probe can be functionalized with the capture or detection label to thereby consume or otherwise block the hydroxyl group. Alternatively, the 3′ hydroxyl group simply can be cleaved, replaced or modified so as to render the probe non-extendable.

[0591] Any of the polynucleotides of the present invention can be labeled, if desired, by incorporating a label detectable by spectroscopic, photochemical, biochemical, immunochemical, or chemical means. For example, useful labels include radioactive substances (³²P, ³⁵S, ³H, ²⁵I), fluorescent dyes (5-bromodesoxyuridine, fluorescein, acetylaminofluorene, digoxigenin) or biotin. Preferably, polynucleotides are labeled at their 3′ and 5′ ends. Examples of non-radioactive labeling of nucleotide fragments are described in the French patent No. FR-7810975 and by Urdea et al. (Nuc Acids Res 16:4937 (1988)). In addition, the probes according to the present invention may have structural characteristics such that they allow the signal amplification, such structural characteristics being, for example, branched DNA probes as described in EP 0 225 807.

[0592] A label can also be used to capture the primer so as to facilitate the immobilization of either the primer or a primer extension product, such as amplified DNA, on a solid support. A capture label is attached to the primers or probes and can be a specific binding member that forms a binding pair with the solid's phase reagent's specific binding member, for example biotin and streptavidin. Therefore depending upon the type of label carried by a polynucleotide or a probe, it may be employed to capture or to detect the target DNA. Further, it will be understood that the polynucleotides, primers or probes provided herein, may, themselves, serve as the capture label. For example, in the case where a solid phase reagent's binding member is a nucleotide sequence, it may be selected such that it binds a complementary portion of a primer or probe to thereby immobilize the primer or probe to the solid phase. In cases where a polynucleotide probe itself serves as the binding member, those skilled in the art will recognize that the probe will contain a sequence or “ail” that is not complementary to the target. In the case where a polynucleotide primer itself serves as the capture label, at least a portion of the primer will be free to hybridize with a nucleotide on a solid phase. DNA labeling techniques are well known in the art.

[0593] Any of the polynucleotides, primers and probes of the present invention can be conveniently immobilized on a solid support. Solid supports are known to those skilled in the art and include the walls of wells of a reaction tray, test tubes, polystyrene beads, magnetic beads, nitrocellulose strips, membranes, microparticles such as latex particles, sheep (or other animal) red blood cells, duracytes and others. The solid support is not critical and can be selected by one skilled in the art. Thus, latex particles, microparticles, magnetic or non-magnetic beads, membranes, plastic tubes, walls of microtiter wells, glass or silicon chips, sheep (or other suitable animal's) red blood cells and duracytes are all suitable examples. Suitable methods for immobilizing nucleotides on solid phases include ionic, hydrophobic, covalent interactions and the like. A solid support, as used herein, refers to any material that is insoluble, or can be made insoluble by a subsequent reaction. The solid support can be chosen for its intrinsic ability to attract and immobilize the capture reagent. Alternatively, the solid phase can retain an additional receptor that has the ability to attract and immobilize the capture reagent. The additional receptor can include a charged substance that is oppositely charged with respect to the capture reagent itself or to a charged substance conjugated to the capture reagent. As yet another alternative, the receptor molecule can be any specific binding member which is immobilized upon (attached to) the solid support and which has the ability to immobilize the capture reagent through a specific binding reaction. The receptor molecule enables the indirect binding of the capture reagent to a solid support material before the performance of the assay or during the performance of the assay. The solid phase thus can be a plastic, derivatized plastic, magnetic or non-magnetic metal, glass or silicon surface of a test tube, microtiter well, sheet, bead, microparticle, chip, sheep (or other suitable animal's) red blood cells, duracytes and other configurations known to those of ordinary skill in the art. The polynucleotides of the invention can be attached to or immobilized on a solid support individually or in groups of at least 2, 5, 8, 10, 12, 15, 20, or 25 distinct polynucleotides of the invention to a single solid support. In addition, polynucleotides other than those of the invention may be attached to the same solid support as one or more polynucleotides of the invention.

[0594] The polynucleotides of the invention that are expressed or repressed in response to environmental stimuli such as, for example, biotic or abiotic stress or treatment with chemicals or pathogens or at different developmental stages can be identified by employing an array of nucleic acid samples, e.g., each sample having a plurality of oligonucleotides, and each plurality corresponding to a different plant gene, on a solid substrate, e.g., a DNA chip, and probes corresponding to nucleic acid expressed in, for example, one or more plant tissues and/or at one or more developmental stages, e.g., probes corresponding to nucleic acid expressed in seed of a plant relative to control nucleic acid from sources other than seed. Thus, genes that are upregulated or downregulated in the majority of tissues at a majority of developmental stages, or upregulated or downregulated in one tissue such as in seed, can be systematically identified. The probes may also correspond to nucleic acid expressed in respone to a defined treatment such as, for example, a treatment with a variety of plant hormones or the exposure to specific environmental conditions involving, for example, an abiotic stress or exposure to light.

[0595] Specifically, labeled rice cRNA probes were hybridized to the rice DNA array, expression levels were determined by laser scanning and then rice genes were identified that had a particular expression pattern. The rice oligonucleotide probe array consists of probes from over 18,000 unique rice genes, which covers approximately 40-50% of the genome. This genome array permits a broader, more complete and less biased analysis of gene expression.

[0596] As described herein, GeneChip® technology was utilized to discover rice genes that are preferentially (or exclusively) expressed during the grain filling process in specific tissues of the plant grain such as, for example, the aleurone, embryo, endosperm, seed coat, etc.

[0597] Using this approach, 461 genes were identified, the expression of which was specifically elevated during the grain filling process.

[0598] Consequently, the invention also deals with a method for detecting the presence of a polynucleotide including a nucleotide sequence which is substantially similar, and preferably has at least between 70% and 99% sequence identity to any one of SEQ ID NO: 1 to 461, 501-511, and 513-641, respectively, encoding a polypeptide the expression of which is up-regulated during grain filing, or a fragment or a variant thereof, or a complementary sequence thereto in a sample, the method including the following steps of:
[0599] (a) bringing into contact a nucleotide probe or a plurality of nucleotide probes which can hybridize with polynucleotide having a nucleotide sequence which is substantially similar, and preferably has at least between 70% and 99% sequence identity to any one of SEQ ID NO: 1 to 461, 501-511, and 513-641, respectively, encoding a polypeptide the expression of which is up-regulated during grain filling, or a fragment or a variant thereof, or a complementary sequence thereto and the sample to be assayed.
[0600] (b) detecting the hybrid complex formed between the probe and a nucleotide in the sample.

[0601] The invention further concerns a kit for detecting the presence of a polynucleotide including a nucleotide sequence which is substantially similar, and preferably has at least between 70% and 99% sequence identity to any one of SEQ ID NO: 1 to 461, 501-511, and 513-641, respectively, encoding a polypeptide the expression of which is up-regulated during grain filling, or a fragment or a variant thereof, or a complementary sequence thereto in a sample, the kit including a nucleotide probe or a plurality of nucleotide probes which can hybridize with a nucleotide sequence included in a polynucleotide including a nucleotide sequence which is substantially similar, and preferably has at least between 70% and 99% sequence identity to any one of SEQ ID NO: 1 to 461, 501-511, and 513-641, respectively, encoding a polypeptide the expression of which is up-regulated during grain filing, or a fragment or a variant thereof, or a complementary sequence thereto and, optionally, the reagents necessary for performing the hybridization reaction.

[0602] In a first preferred embodiment of this detection method and kit, the nucleotide probe or the plurality of nucleotide probes are labeled with a detectable molecule. In a second preferred embodiment of the method and kit, the nucleotide probe or the plurality of nucleotide probes has been immobilized on a substrate.

[0603] The isolated polynucleotides of the invention can be used to create various types of genetic and physical maps of the genome of rice or other plants. Such maps are used to devise positional cloning strategies for isolating novel genes from the mapped crop species. The sequences of the present invention are also useful for chromosome mapping, chromosome identification, tagging of genes that are involved in the grain filling process.

[0604] The isolated polynucleotides of the invention can further be used as probes for identifying polymorphisms associated with phenotypes of interest such as, for example, enhanced phosphate utilization, and higher yield. Briefly, total DNA is isolated from an individual or isogenic line, cleaved with one or more restriction enzymes, separated according to mass, transferred to a solid support, and hybridized with a probe molecule according to the invention. The pattern of fragments hybridizing to a probe molecule is compared for DNA from different individuals or lines, where differences in fragment size signals a polymorphism associated with a particular nucleotide sequence according to the present invention. After identification of polymorphic sequences, linkage studies can be conducted. After identification of many polymorphisms using a nucleotide sequence according to the invention, linkage studies can be conducted by using the individuals showing polymorphisms as parents in crossing programs. Recombinants, F₂ progeny recombinants or recombinant inbreds, can then be analyzed using the same restriction enzyme/hybridization procedure. The order of DNA polymorphisms along the chromosomes can be inferred based on the frequency with which they are inherited together versus inherited independently. The closer together two polymorphisms occur in a chromosome, the higher the probability that they are inherited together. Integration of the relative positions of polymorphisms and associated marker sequences produces a genetic map of the species, where the distances between markers reflect the recombination frequencies in that chromosome segment. Preferably, the polymorphisms and marker sequences are sufficiently numerous to produce a genetic map of sufficiently high resolution to locate one or more loci of interest.

[0605] The use of recombinant inbred lines for such genetic mapping is described for rice (Oh et al, Mol Cells 8:175 (1998); Nandi et al, Mol Gen Genet 255:1 (1997); Wang et al, Genetics 136:1421 (1994)), sorghum (Subudhi et al, Genome 43:240 (2000)), maize (Burr et al., Genetics 118:519 (1998); Gardineret al, Genetics 134:917 (1993)), and Arabidopsis (Methods in Molecular Biology, Martinez-Zapater and Salinas, eds., 82:137-146, (1998)). However, this procedure is not limited to plants and can be used for other organisms such as yeast or other fungi, or for oomycetes or other protistans.

[0606] The nucleotide sequences of the present invention can also be used for simple sequence tppeat identification, also known as single sequence repeat, (SSR) mapping. SSR mapping in rice has been described by Miyao et al. (DNA Res 3:233 (1996)) and Yang et al. (Mol Gen Genet 245:187 (1994)), and in maize by Ahn et al. (Mol Gen Genet 241:483 (1993)). SSR mapping can be achieved using various methods. In one instance, polymorphisms are identified when sequence specific probes flanking an SSR contained within an sequence of the invention are made and used in polymerase chain reaction (PCR) assays with template DNA from two or more individuals or, in plants, near isogenic lines. A change in the number of tandem repeats between the SSR-flanking sequence produces differently sized fragments (U.S. Pat. No. 5,766,847). Alternatively, polymorphisms can be identified by using the PCR fragment produced from the SSR-flanking sequence specific primer reaction as a probe against Southern blots representing different individuals (Refseth et al., Electrophoresis 18:1519 (1997)). Rice SSRs were used to map a molecular marker closely linked to a nuclear restorer gene for fertility in rice as described by Akagi et al. (Genome 39:205 (1996)).

[0607] The nucleotide sequences of the present invention can be used to identify and develop a variety of microsatellite markers, including the SSRs described above, as genetic markers for comparative analysis and mapping of genomes. The nucleotide sequences of the present invention can be used in a variation of the SSR technique known as inter-SSR (ISSR), which uses microsatellite oligonucleotides as primers to amplify genomic segments different from the repeat region itself (Zietkiewicz et al., Genomics 20:176 (1994)). ISSR employs oligonucleotides based on a simple sequence repeat anchored or not at their 5′- or 3′-end by two to four arbitrarily chosen nucleotides, which triggers site-specific annealing and initiates PCR amplification of genomic segments which are flanked by inversely orientated and closely spaced repeat sequences. In one embodiment of the present invention, microsatellite markers derived from the nucleotide sequences disclosed in the Sequence Listing, or substantially similar sequences or allelic variants thereof, may be used to detect the appearance or disappearance of markers indicating genomic instability as described by Leroy et al. (Electron. J. Biotechnol, 3(2), at http://www.ejb.org (2000)), where alteration of a fingerprinting pattern indicated loss of a marker corresponding to a part of a gene involved in the regulation of cell proliferation. Microsatellite markers derived from nucleotide sequences as provided in the Sequence Listing will be useful for detecting genomic alterations such as the change observed by Leroy et al. (Electron. J Biotechnol, 3(2), supra (2000)) which appeared to be the consequence of microsatellite instability at the primer binding site or modification of the region between the microsatellites, and illustrated somaclonal variation leading to genomic instability. Consequently, the nucleotide sequences of the present invention are useful for detecting genomic alterations involved in somaclonal variation, which is an important source of new phenotypes.

[0608] In addition, because the genomes of closely related species are largely syntenic (that is, they display the same ordering of genes within the genome), these maps can be used to isolate novel alleles from wild relatives of crop species by positional cloning strategies. This shared synteny is very powerful for using genetic maps from one species to map genes in another. For example, a gene mapped in rice provides information for the gene location in maize and wheat.

[0609] The various types of maps discussed above can be used with the nucleotide sequences of the invention to identify Quantitative Trait Loci (QTLs) for a variety of uses, including marker-assisted breeding. Many important crop traits are quantitative traits and result from the combined interactions of several genes. These genes reside at different loci in the genome, often on different chromosomes, and generally exhibit multiple alleles at each locus. Developing markers, tools, and methods to identify and isolate the QTLs involved regulating the content and composition of the plant grain, enables marker-assisted breeding to enhance the nutritional value of the grain or suppress undesirable traits that interfere with an efficient grain filling process. The nucleotide sequences as provided in the Sequence Listing can be used to generate markers, including single-sequence repeats (SSRs) and microsatellite markers for QTLs and utilization to assist marker-assisted breeding. The nucleotide sequences of the invention can be used to identify QTLs regulating the grain filling process and isolate alleles as described by Li et al. in a study of QTLs involved in resistance to a pathogen of rice. (Li et al., Mol Gen Genet 261:58 (1999)). In addition to isolating QTL alleles in rice, other cereals, and other monocot and dicot crop species, the nucleotide sequences of the invention can also be used to isolate alleles from the corresponding QTL(s) of wild relatives. Transgenic plants having various combinations of QTL alleles can then be created and the effects of the combinations measured. Once an ideal allele combination has been identified, crop improvement can be accomplished either through biotechnological means or by directed conventional breeding programs. (Flowers et al., J Exp Bot 51:99 (2000); Tanksley and McCouch, Science 277:1063 (1997)).

[0610] In another embodiment the nucleotide sequences of the invention can be used to help create physical maps of the genome of maize, Arabidopsis and related species. Where the nucleotide sequences of the invention have been ordered on a genetic map, as described above, then the nucleotide sequences of the invention can be used as probes to discover which clones in large libraries of plant DNA fragments in YACs, PACs, etc. contain the same nucleotide sequences of the invention or similar sequences, thereby facilitating the assignment of the large DNA fragments to chromosomal positions. Subsequently, the large BACs, YACs, etc. can be ordered unambiguously by more detailed studies of their sequence composition and by using their end or other sequence to find the identical sequences in other cloned DNA fragments (Mozo et al., Nat Genet 22:271 (1999)). Overlapping DNA sequences in this way allows assembly of large sequence contigs that, when sufficiently extended, provide a complete physical map of a chromosome. The nucleotide sequences of the invention themselves may provide the means of joining cloned sequences into a contig, and are useful for constructing physical maps.

[0611] In another embodiment, the nucleotide sequences of the present invention may be useful in mapping and characterizing the genomes of other cereals. Rice has been proposed as a model for cereal genome analysis Havukkala, Curr Opin Genet Devel 6:711 (1996)), based largely on its smaller genome size and higher gene density, combined with the considerable conserved gene order among cereal genomes (Ahn et al., Mol Gen Genet 241:483 (1993)). The cereals demonstrate both general conservation of gene order (synteny) and considerable sequence homology among various cereal gene families. This suggests that studies on the functions of genes or proteins from rice according to the present invention could lead to elucidation of the functions of orthologous genes or proteins in other cereals, including maize, wheat, secale, sorghum, barley, millet, teff, milo, triticale, flax, gramma grass, Tripsacum sp., and teosinte. The nucleotide sequences according to the invention can also be used to physically characterize homologous chromosomes in other cereals, as described by Sarma et al. (Genome 43:191 (2000)), and their use can be extended to non-cereal monocots such as sugarcane, grasses, and lilies.

[0612] Given the synteny between rice and other cereal genomes, the nucleotide sequences of the present invention can be used to obtain molecular markers for mapping and, potentially, for positional cloning. Kilian et al. described the use of probes from the rice genomic region of interest to isolate a saturating number of polymorphic markers in barley, which were shown to map to syntenic regions in rice and barley, suggesting that the nucleotide sequences of the invention derived from the rice genome would be useful in positional cloning of syntenic grain-filling genes of interest from other cereal species. (Kilian, et al., Nucl Acids Res 23:2729 (1995); Kilian, et al, Plant Mol Biol 35:187 (1997)). Synteny between rice and barley has recently been reported in the area of the carrying malting quality QTLs (Han, et al., Genome 41:373 (1998)), and use of synteny between cereals for positional cloning efforts is likely to add considerable value to rice genome analysis. Likewise, mapping of the ligules region of sorghum was facilitated using molecular markers from a syntenic region of the rice genome. (Zwick, et al., Genetics 148:1983 (1998)).

[0613] Rice marker technology utilizing the nucleotide sequences of the present invention can also be used to identify QTL alleles from a wild relative of cultivated rice, for example as described by Xiao, et al. (Genetics 150:899 (1998)). Wild relatives of domesticated plants represent untapped pools of genetic resources for abiotic and biotic stress resistance, apomixis and other breeding strategies, plant architecture, determinants of yield, secondary metabolites, and other valuable traits. In rice, Xiao et al. (supra) used molecular markers to introduce an average of approximately 5% of the genome of a wild relative, and the resulting plants were scored for phenotypes such as plant height, panicle length and 1000-grain weight. Trait-improving alleles were found for all phenotypes except plant height, where any change is considered negative. Of the 35 trait-improving alleles, Xiao et al. found that 19 had no effect on other phenotypes whereas 16 had deleterious effects on other traits. The nucleotide sequences of the invention such as those provided in the Sequence Listing can be employed as molecular markers to identify QTL alleles involved in the regulation of the grain filling process from a wild relative, by which these valuable traits can be introgressed from wild relatives using methods including, but not limited to, that described by Xiao et al. ((1998) supra). Accordingly, the nucleotide sequences of the invention can be employed in a variety of molecular marker technologies for yield improvement.

[0614] Following the procedures described above to identify polymorphisms, and using a plurality of the nucleotide sequences of the invention, any individual (or line) can be genotyped. Genotyping a large number of DNA polymorphisms such as single nucleotide polymorphisms (SNPs), in breeding lines makes it possible to find associations between certain polymorphisms or groups of polymorphisms, and certain phenotypes. In addition to sequence polymorphisms, length polymorphisms such as triplet repeats are studied to find associations between polymorphism and phenotype. Genotypes can be used for the identification of particular cultivars, varieties, lines, ecotypes, and genetically modified plants or can serve as tools for subsequent genetic studies of complex traits involving multiple phenotypes.

[0615] The patent publication WO95/35505 and U.S. Pat. Nos. 5,445,943 and 5,410,270 describe scanning multiple alleles of a plurality of loci using hybridization to arrays of oligonucleotides. The nucleotide sequences of the invention are suitable for use in genotyping techniques useful for each of the types of mapping discussed above.

[0616] In a preferred embodiment, the nucleotide sequences of the invention are useful for identifying and isolating a least one unique stretch of protein-encoding nucleotide sequence. The nucleotide sequences of the invention are compared with other coding sequences having sequence similarity with the sequences provided in the Sequence Listing, using a program such as BLAST. Comparison of the nucleotide sequences of the invention with other similar coding sequences permits the identification of one or more unique stretches of coding sequences encoding polypeptides that are up-regulated during grain filling that are not identical to the corresponding coding sequence being screened. Preferably, a unique stretch of coding sequence of about 25 base pairs (bp) long is identified, more preferably 25 bp, or even more preferably 22 bp, or 20 bp, or yet even more preferably 18 bp or 16 bp or 14 bp. In one embodiment, a plurality of nucleotide sequences is is screened to identify unique coding sequences accroding to the invention. In one embodiment, one or more unique coding sequences accroding to the invention can be applied to a chip as part of an array, or used in a non-chip array system. In a further embodiment, a plurality of unique coding sequences accroding to the invention is used in a screening array. In another embodiment, one or more unique coding sequences accroding to the invention can be used as immobilized or as probes in solution. In yet another embodiment, one or more unique coding sequences accroding to the invention can be used as primers for PCR. In a further embodiment, one or more unique coding sequences accroding to the invention can be used as organism specific primers for PCR in a solution containing DNA from a plurality of sources.

[0617] In another embodiment unique stretches of nucleotide sequences according to the invention are identified that are preferably about 30 bp, more preferably 50 bp or 75 bp, yet more preferably 100 bp, 150 bp, 200 bp, 250, 500 bp, 750 bp, or 1000 bp. The length of an unique coding sequence may be chosen by one of skill in the art depending on its intended use and on the characteristics of the nucleotide sequence being used. In one embodiment, unique coding sequences accroding to the invention may be used as probes to screen libraries to find homologs, orthologs, or paralogs. In another embodiment, unique coding sequences accroding to the invention may be used as probes to screen genomic DNA or cDNA to find homologs, orthologs, or paralogs. In yet another embodiment, unique coding sequences accroding to the invention may be used to study gene evolution and genome evolution.

### EXAMPLES

[0618] The invention will be further described by reference to the following detailed examples. These examples are provided for purposes of illustration only, and are not intended to be limiting unless otherwise specified. Standard recombinant DNA and molecular cloning techniques used here are well known in the art and are described in detail in Sambrook et al. (Molecular Cloning: A Laboratory Manual, Cold Spring Harbor Laboratory Press (1989)) and by Ausubel et al. (Current Protocols in Molecular Biology, Greene Publishing (1992)).

### Example 1

### Isolation and Sequencing of DNA Fragments

1.1 Isolation and Sequencing of Genomic DNA Fragments

[0619] Genomic DNA was isolated from nuclei of Oryza sativa L. ssp japonica cv Nipponbare and then sheared to produce fragments of approximately 500 bp. Using a method derived from the method of Mao et al. (Genome Res 10:982 (2000)), seeds were germinated on cheese cloth immersed in water and grown for 4-6 weeks under greenhouse conditions. After plants reached a height of approximately 5-8 inches, the upper parts of the green leaves were harvested and wrapped in aluminum foil at 4° C. overnight. Leaf material was then stored at −80° C. or directly used for extraction of nuclei. Intact nuclei were isolated by homogenization (in a blender for flesh material or by grinding with mortar and pestle for frozen material) in a buffer containing 10 mM Trizra base, 80 mM KCl, 10 mM EDTA, 1 mM spermidine, 1 mM spermine, 0.5 M sucrose, 0.5% Triton-X-100, 0.15% β-mercaptoethanol pH 9.5. The homogenate was filtered and nuclei recovered by gentle centrifugation using a fixed-angle rotor at 1,800 g at 4 C for 20 minutes. The pellet recovered after centrifugation was gently resuspended with the assistance of a small paint brush soaked in ice cold wash buffer and wash buffer added. Particulate matter remaining in the suspension was removed by filtering the resuspended nuclei into a 50 ml centrifuge tube through two layers of miracloth by gravity and centrifuging the filtrate at 57 g (500 rpm), 4 C for 2 minutes to remove intact cells and tissue residues. The supernatant fluid was transferred into a fresh centrifuge tube and nuclei were pelleted by centrifugation at 1,800 g, 4 C for 15 minutes in a swinging bucket centrifuge.

[0620] DNA was isolated from the nuclear preparation by phenolchloroform extraction, as in Sambrook et al (supra). Isolated total genomic DNA was physically sheared (Hydroshear) to generate for generating random DNA fragments, and fragments of approximately 500 bp were recovered. DNA was eluted and the ends filled in using T₄ DNA polymerase, Klenow fragments, and dNTPs. Double-stranded DNA was Tinkered and cloned into a Novartis proprietary medium-copy vector derived from pSC101.

[0621] Vector inserts were amplified by PCR and sequenced using the MegaBACE sequencing system (Molecular Dynamics, Amersham). The amplification reaction was diluted before use and was not purified using an exonuclease/alkaline phosphatase procedure. Sequencing reactions were performed using DYEnamic ET Terminator Kit. The reactions contained approximately 50 ng of amplicon, DYEnamic ET Terminator premix, and 5 pmol of −40 M13 forward primer. The sequencing reaction is amplified for 30 cycles, and reaction products are concentrated and purified using ethanol precipitation. The sample was electrokinetically injected into the capillary at 3 kV for 45 sec and separated via electrophoresis at 9 kV for 120 min.

1.2 Isolation and Sequencing of cDNA Fragments

[0622] Construction of rice cDNA library. Total RNA was purified from rice plant tissue using standard total RNA purification methods. PolyA+ RNA was isolated from the total RNA using the Qiagen Oligotex mRNA purification system (Qiagen, Valencia, Calif.), and cDNA was generated using cDNA synthesis reagents from Life Technologies (Rockville, Md.). First strand cDNA synthesis was catalyzed by reverse transcriptase using oligo dT primers with a NotI restriction site. Second strand synthesis was catalyzed by DNA polymerase. An oligonucleotide linker with a SalI restriction endonuclease site was attached to the 5′ end of the cDNAs using DNA ligase. The cDNAs were digested with NotI and SalI restriction endonucleases and inserted into an E. coli-replicating plasmid harboring a selectable marker. E. coli was transfected with the recombinant plasmids and grown on selectable media. E. coli colonies were individually picked off the selectable media and placed into storage plates.

[0623] Sequencing the rice cDNA library, The DNA sequence of the cDNA cloned into the plasmid purified from an E. coli colony was determined using standard dideoxy sequencing methods. Oligonucleotide primers respectively corresponding to plasmid DNA regions upstream of the 5′ end of the cDNA insert (Forward reaction) and downstream of the 3′ end of the cDNA insert (Reverse reaction) were used in the dideoxy sequencing reactions. If the DNA sequence determined as a result of the Forward and Reverse reactions from the cDNA overlapped, the two sequences could be merged into a contig using computerized analysis software (Consed, University of Washington, Seattle), to assemble a full-length sequence of the cDNA. In cases case where DNA sequence from the Forward and Reverse reactions from a single clone did not overlap sufficiently to be assembled into a contig, such that there was a region of unsequenced DNA to bridge the DNA from the Forward and Reverse reaction in order to form a contig, the DNA sequence of the separating region was determined using one of two dideoxy sequencing methods. In a “primer walking” approach, a primer specifically corresponding to the 3′ end of the DNA sequence determined from the Forward reaction was used in a second dedeoxy sequencing reaction. The primer walking procedure was repeated until the DNA sequence that separated the original Forward and Reverse was resolved and a contig could be assembled. Alternatively, the clone harboring the cDNA was subjected to transposon in vitro insertion dideoxysequencing (Epicentre, Madison, Wis.). In this procedure, the insertion process was random and the result was multiple DNA sequence coverage over the targeted cDNA, where the sequences thus obtained were assembled into a contig.

### Example 2

### GeneChip® Standard Protocol

[0624] The standard protocol for using the GeneChip® to quantitatively measure plant gene expression was carried out as outlined below:

Quantitation of total RNA

[0625] 30 Total RNA from plant tissue was extracted and quantified. Quantified total RNA using
[0626] GeneQuant
[0627] IOD₂₆₀=40 mg RNA/ml; A₂₆₀/A₂₈₀=1.9 to about 2.1

[0628] 2: Ran gel to check the integrity and purity of the extracted RNA

Synthesis of Double-Stranded cDNA

[0629] Gibco/BRL SuperScript Choice System for cDNA Synthesis (Cat#IB090-019) was employed to prepare cDNAs. T7-(dT)₂₄ oligonucleotides were prepared and purified by HPLC.

SEQ ID NO: 4709)

(5′- GGCCAGTGAATTGTAATACGACTCACTATAGGGAGGCGG-
(dT)₂₄-3′;.

[0630] Step 1. Primer Hybridization:
[0631] Incubated at 70° C. for 10 minutes
[0632] Spun quickly and put on ice briefly

[0633] Step 2. Temperature Adjustment:
[0634] Incubated at 42° C. for 2 minutes

[0635] Step 3. First Strand Synthesis Carried Out Using:
[0636] DEPC-water—1:1
[0637] RNA (10:g final)—10:1
[0638] T7=(dT)₂₄ Primer (100 pmol final)—1:1 pmol
[0639] 5× 1^{st} strand cDNA buffer—4:1
[0640] 0.1 M DTT(10 mM final)—2:1
[0641] 10 mM dNTP mix (500:M final)—1:1
[0642] Superscript II RT 200 U/:l—1:1
[0643] Total of 20:1
[0644] Mixed well
[0645] Incubated at 42° C. for 1 hour

[0646] Step 4. Second Strand Synthesis:
[0647] Placed reactions on ice, quick spin
   [0648] DEPC-water—91:1
   [0649] 5× 2^{nd} strand cDNA buffer—30:1
   [0650] 10 mM dNTP mix (250 mM final)—3:1
   [0651] E. coli DNA ligase (10U/:1)—1:1
   [0652] E. coli DNA polymerase 1-10 U/:l—4:1
   [0653] RnaseH 2U/:l—1:1
   [0654] T4 DNA polymerase 5 U/:l—2:1
   [0655] 0.5 M EDTA (0.5 M final)—10:1
   [0656] Total 162:1
[0657] Mixed/spun down/incubated 16° C. for 2 hours

[0658] Step 5. Completing the Reaction:
[0659] Incubated at 16° C. for 5 minutes
   Purification of Double Stranded cDNA
[0660] 1. Centrifuged PLG (Phase Lock Gel, Eppendorf 5 Prime Inc., pl-188233) at 14,000×, transfered 162:1 of cDNA to PLG
[0661] 2. Added 162:1 of Phenol:Chloroform:Isoamyl alcohol (pH 8.0), centrifuge 2 minutes

[0662] 3. Transfered the supernatant to a fresh 1.5 ml tube, add

| | |
|---|---|
| Glycogen (5 mg/ml) | 2 |
| 0.5 M NR₄OAC (0.75 × Vol) | 120 |
| ETOH (2.5 × Vol, −20° C.) | 400 |

[0663] 4. Mixed well and centrifuge at 14,000× for 20 minutes
[0664] 5. Removed supernatant, added 0.5 ml 80% EtOH (−20° C.)
[0665] 6. Centrifuged for 5 minutes, air dry or by speed vac for 5-10 minutes
[0666] 7. Added 44:1 DEPC H₂O
   Analyzed quantity and size distribution of cDNA

[0667] Ran a gel using 1:1 ratio of the double-stranded synthesis product to loading Buffer

Synthesis of biotinylated cRNA
(used Enzo BioArray High Yield
RNA Transcript Labeling Kit Cat#900182)

| | |
|---|---|
| Purified cDNA | 22:1 |
| 10× Hy buffer | 4:1 |
| 10× biotin ribonucleotides | 4:1 |
| 10× DTT | 4:1 |
| 10× Rnase inhibitor mix | 4:1 |
| 20× T7 RNA polymerase | 2:1 |
| Total | 40:1 |

[0668] Centrifuged 5 seconds, and incubated for 4 hours at 37° C.

[0669] Gently mixed every 30-45 minutes

Purification and quantification of cRNA
(used Qiagen Rneasy Mini kit Cat# 74103)

| | | |
|---|---|---|
| cRNA | 40:1 | |
| DEPC H₂O | 60:1 | |
| RLT buffer | 350:1 | mix by vortexing |
| EtOH | 250:1 | mix by pipetting |
| Total | 700:1 | |

Waited 1 minute or more for the RNA to stick

[0670] Centrifuged at 2000 rpm for 5 minutes

| | |
|---|---|
| RPE buffer | 500:1 |

[0671] Centrifuged at 10,000 rpm for 1 minute

| | |
|---|---|
| RPE buffer | 500:1 |

Centrifuged at 10,000 rpm for 1 minute

[0672] Centrifuged at 10,000 rpm for 1 minute to dry the column

| | |
|---|---|
| DEPC H₂O | 30:1 |

[0673] Waited for 1 minute, then elute cRNA from by centrifugation, 10 K 1 minute

| | |
|---|---|
| DEPC H₂O | 30:1 |

Repeated previous step

[0674] Determined concentration and dilute to 1:g/:l concentration

Fragmentation of cRNA

| | |
|---|---|
| cRNA (1:g/:1) | 15:1 |
| 5× Fragmentation Buffer* | 6:1 |
| DEPC H₂O | 9:1 |
| | 30:1 |

[0675] *5× Fragmentation Buffer

| | | |
|---|---|---|
| 1 M Tris (pH8.1) | 4.0 | ml |
| MgOAc | 0.64 | g |
| KOAC | 0.98 | g |
| DEPC H₂O | | |
| Total | 20 | ml |
| Filter Sterilize | | |

Array washed and stained in:
[0676] Stringent Wash Buffer**
[0677] Non-Stringent Wash Buffer**
[0678] SAPE Stain****
[0679] Antibody Stain*****
   Washed on Fluidics Station Using the Appropriate Antibody Amplification Protocol
[0680] **Stringent Buffer. 12×MES 83.3 ml, 5 M NaCl 5.2 ml, 10% Tween 1.0 ml, H₂O 910 ml,
   [0681] Filter Sterilize
[0682] ***Non-Stringent Buffer. 20×SSPE 300 ml, 10% Tween 1.0 ml, H₂O 698 ml, Filter Sterilize, Antifoam 1.0.
   [0683] ****SAPE stain: 2× Stain Buffer 600:1, BSA 48:1, SAPE 12:1, H₂O 540:1.
[0684] *****Antibody Stain: 2× Stain Buffer 300:1, H₂O 266.4:1, BSA 24:1, Goat IgG 6:1, Biotinylated Ab 3.6:1

### Example 3

### Profiling of Genes Involved in Nutrition partitioning During Grain Development

[0685] A GeneChip® Rice Genome Array (Affymetrix, Santa Clara, Calif.) was used to examine how accumulation of carbohydrates, storage protein and fatty acids is coordinated at RNA level during grain development.

[0686] RNA expression of three major pathways and associated genes involving nutrition partitioning was examined, including synthesis and transport of carbohydrates, proteins, and fatty acids. A total of 491 genes involved in these pathways were first selected based on their sequence annotation and functional classification. RNA expression was determined in 39 samples representing different developmental stages including samples collected before and during grain filling.

3.1 Plant Growth Conditions and Sampling

[0687] Nipponbare rice was grown in the greenhouse with 12 hr light cycle and temperature of 29° C. during the day and 21° C. during the night. Humidity was maintained at 30%. Plants were grown in pots containing 50% sunshine mix and 50% nitrohumus. The descriptions of the samples collected for this analysis are listed in table 1. Individual tissues were collected from a minimum of five plants and pooled. Total RNA was extracted from one gram of tissue using the Qiagen RNA Easy Maxikit (Qiagen, Valencia, Calif.).

[0688] The experiments were carried out as described in T. Zhu e al. Plant Physiol. Biochem. 39, 221 (2001).

TABLE 1
Rice samples included in the study of genes involved
in nutrition partitioning during grain development

| | Days after | developmental | | |
|---|---|---|---|---|
| Description | germination | stage | Rank | Category |
| germinating | 5 | 11 | 1 | root |
| seedling (root) | | | | |
| germinating | 5 | 12 | 1 | leaf |
| seedling [LEAF] | | | | |
| 3-4 leaf arial | 18 | 13 | 2 | arial |
| tillering | 49 | 14 | 3 | root |
| stage (root) | | | | |
| tillering | 49 | 15 | 3 | leaf |
| stage (leaf) | | | | |
| tillering | 49 | 16 | 3 | arial |
| stage (arial) | | | | |
| Booting Stage | 60 | 17 | 4 | repr |
| panicle 1-3 cm | | | | |
| Booting stage | 62 | 18 | 5 | repr |
| panicle 4-7 cm | | | | |
| Booting Stage | 64 | 19 | 6 | repr |
| panicle 8-14 cm | | | | |
| Booting Stage | 66 | 20 | 7 | repr |
| panicle 15-20 cm | | | | |
| Booting Stage root | 60 | 22 | 6 | root |
| Booting Stage leaf | 60 | 23 | 6 | leaf |
| Booting stage arial | 60 | 24 | 6 | arial |
| panicle emergence- | 78 | 25 | 8 | root |
| root | | | | |
| panicle emergence - | 78 | 26 | 8 | stem |
| stem | | | | |
| panicle emergence- | 78 | 21 | 8 | repr |
| panicle | | | | |
| Seed milk | 88 | 39 | | repr |
| stage [˜9DAF] | | | | |
| Seed -soft | 94 | 40 | 14 | repr |
| dough [˜14DAF] | | | | |
| Seed hard | 100 | 41 | 15 | repr |
| dough [˜21DAF] | | | | |
| inflorescence- no seeds | 88 | 30 | 9 | repr |
| maturation stem | 90 | 27 | 15 | stem |
| maturation root | 90 | 28 | 15 | root |
| maturation leaf | 90 | 29 | 15 | leaf |
| embryo | 88 | 42 | 14 | embryo |
| endosperm | 88 | 43 | 14 | endospm |
| seed coat | 88 | 44 | 14 | coat |
| Senescence -stem | 100 | 31 | 16 | stem |
| Senescence [LEAF] | 100 | 32 | 16 | leaf |
| aleurone | 88 | 45 | 14 | aleurone |
| pollen mixed | 55 | 33 | | pollen |
| seed day 0 | 79 | 34 | 9 | repr |
| post anthesis | | | | |
| seed day 2 | 81 | 35 | 10 | repr |
| post anthesis | | | | |
| seed day 4 | 83 | 36 | 11 | repr |
| post anthesis | | | | |
| seed day 7 | 86 | 37 | 12 | repr |
| post anthesis | | | | |
| seed day 8 | 87 | 38 | 13 | repr |
| post anthesis | | | | |

### Example 4

### Characterization of Gene Expression Profiles

4.1 Data Analysis 1

[0689] A rice gene array and probes derived from rice RNA extracted from different tissues and developmental stages were used to identify the expression profile of genes on the chip. The rice array contains over 23,000 genes (approximately 18,000 unique genes) or roughly 50% of the rice genome and is similar to the Arabidopsis GeneChip®) (Affymetrix) with the exception that the 16 oligonucleotide probe sets do not contain mismatch probe sets. The level of expression is therefore determined by internal software that analyzes the intensity level of the 16 probe sets for each gene. The highest and lowest probes are removed if they do not fit into a set of predefined statistical criteria and the remaining sets are averaged to give an expression value. The final expression values are normalized by software, as described below. The advantages of a gene chip in such an analysis include a global gene expression analysis, quantitative results, a highly reproducible system, and a higher sensitivity than Northern blot analyses.

4.2 Data Analysis II

[0690] Data analysis was done using GeneSpring (Silicon Genetics, Redwood, Calif.) and AlignAce. The genechip sequence was blasted to the AC rice contig sequences. The contig with the best alignment was extracted and five gene prediction programs were run on each contig. The programs used were Genscan trained on arabidopsis and maize, Gmhmm trained on rice and Arabidopsis, and Fgenesh and Glimmer trained on rice. All of the predicted CDSs were blasted against the genechip sequence again to extract the top hit predicted CDS. A Perl script was utilized to extract up to 2 kb of the putative promoter sequence. In some of the genechip sequences there was more than one perfect alignment to a predicted CDS; in such cases, both of the perfect alignments were accepted as the putative genes.

TABLE 2
Table 2 provides provides a subset of rice genes the expression
of which is up-regulated during grain filling. Further identified
are SSR sequences in the coding region of the rice genes.

A = Genes involved in rice grain filling, which belong to the functional category of
Carborhydrate Metabolism
B = Genes involved in rice grain filling, which belong to the functional category of
transmembrane proteins
C = Genes involved in rice grain filling, which belong to the functional category of storage
proteins
D = Genes involved in rice grain filling, which belong to the functional category of stress
response proteins
E = 345 Grain Filling Genes
F = Genes involved in rice grain filling, which belong to the functional category of signaling
molecules
G = Genes involved in rice grain filling, which belong to the functional category of
transcription factors
H = Genes involved in rice grain filling, which belong to the functional category of amino
acid Metabolism
I = Genes involved in rice grain filling, which belong to the functional category of Fatty Acid
Metabolism
J = Cereal_Grain_Filling_QTLs (a description of the respective QTLs is provided
in Table . . . below)
K = Beginning of the SSR
L = End of the SSR
M = Nucleotide Sequence of the tri- and tetra-nucleotide repeat units

| SEQ | | | | | | | | | | | | | |
|---|---|---|---|---|---|---|---|---|---|---|---|---|---|
| ID | A | B | C | D | E | F | G | H | I | J | K | L | M |
| 101 | X | — | — | — | X | — | — | — | — | | | | |
| 113 | X | — | — | — | X | — | — | — | — | | 42 | 59 | CCT |
| 1 | — | — | — | X | X | — | — | — | — | | | | |
| 317 | X | — | — | — | X | — | X | — | — | | | | |
| 329 | — | — | — | — | X | — | — | — | — | OS-FLLEN-9-1, | | | |
| | | | | | | | | | | OS-GPL-4-1, | | | |
| | | | | | | | | | | OS-GPP-4-1, | | | |
| | | | | | | | | | | OS-GW100-4-1, | | | |
| | | | | | | | | | | OS-GYLD-4-1 | | | |
| 173 | X | — | — | — | X | — | — | — | — | | | | |
| 331 | — | — | — | — | X | — | — | — | — | OS-GW-5-1 | 5 | 19 | CGG |
| | | | | | | | | | | OS-YLD-5-1, | | | |
| | | | | | | | | | | ZM-MOIST-4-3, | | | |
| | | | | | | | | | | ZM-DMY-4-3, | | | |
| | | | | | | | | | | ZM-YLD-4-1 | | | |
| 333 | — | — | — | — | X | — | — | — | — | | | | |
| 233 | — | — | X | — | X | — | — | — | — | | | | |
| 335 | — | — | — | — | X | — | — | — | — | | | | |
| 119 | X | — | — | — | X | — | — | — | — | | | | |
| 311 | X | — | — | — | X | — | X | — | — | | 358 | 372 | CGC |
| | | | | | | | | | | | 661 | 675 | CGG |
| 149 | X | — | — | — | X | — | — | — | — | | | | |
| 337 | — | — | — | — | X | — | — | — | — | | | | |
| 59 | — | X | — | — | X | — | — | — | — | | | | |
| 339 | — | — | — | — | X | — | — | — | — | | | | |
| 155 | X | — | — | — | X | — | — | — | — | | 1207 | 1221 | CTG |
| 143 | X | — | — | — | X | — | — | — | — | | | | |
| 307 | — | — | — | — | X | — | X | — | — | | 155 | 175 | CTG |
| 341 | — | — | — | — | X | — | — | — | — | | | | |
| 193 | X | — | — | — | X | — | — | — | — | SMS015-9, | 1401 | 1415 | CGT |
| | | | | | | | | | | ZM-MOIST-4-2, | | | |
| | | | | | | | | | | ZM-DMY-4-1 | | | |
| 131 | X | — | — | — | X | — | — | — | — | | | | |
| 199 | X | — | — | — | X | — | — | — | — | OS-AE-1-1, | 207 | 221 | CGC |
| | | | | | | | | | | OS-AE-5-1, | | | |
| | | | | | | | | | | OS-APDF-9-1, | | | |
| | | | | | | | | | | OS-REGEN-3-1, | | | |
| | | | | | | | | | | OS-RGT-5-1, | | | |
| | | | | | | | | | | OS-VGT-2-2, | | | |
| | | | | | | | | | | OS-VGT-5-1, | | | |
| | | | | | | | | | | OS-GC-2-1, | | | |
| | | | | | | | | | | OS-GYLD-1-1, | | | |
| | | | | | | | | | | SMS021-80, | | | |
| | | | | | | | | | | ZM-CPC-5-1, | | | |
| | | | | | | | | | | ZM-ID-5-1, | | | |
| | | | | | | | | | | ZM-IVDOM-5-1, | | | |
| | | | | | | | | | | ZM-IVDOM-5-2, | | | |
| | | | | | | | | | | ZM-IVDOM-5-3, | | | |
| | | | | | | | | | | ZM-MOIST-5-2, | | | |
| | | | | | | | | | | ZM-MOIST-5-2, | | | |
| | | | | | | | | | | ZM-MOIST-5-3, | | | |
| | | | | | | | | | | ZM-BIOM-5-1, | | | |
| | | | | | | | | | | ZM-DMC-6-2, | | | |
| | | | | | | | | | | ZM-DMY-5-1, | | | |
| | | | | | | | | | | ZM-GYLD-5-1, | | | |
| | | | | | | | | | | ZM-GYLD-5-3, | | | |
| | | | | | | | | | | ZM-GYLD-5-3, | | | |
| | | | | | | | | | | ZM-GYLD-6-4, | | | |
| | | | | | | | | | | ZM-GYLD-6-4, | | | |
| | | | | | | | | | | ZM-KW300-5-1, | | | |
| | | | | | | | | | | ZM-TW-5-1, | | | |
| | | | | | | | | | | ZM-YLD-6-1 | | | |
| 301 | — | — | — | — | X | — | X | — | — | OS-VGT-2-2, | | | |
| | | | | | | | | | | OS-GC-2-1 | | | |
| 343 | — | — | — | — | X | — | — | — | — | OS-FLLEN-3-1, | | | |
| | | | | | | | | | | OS-GPL-2-1, | | | |
| | | | | | | | | | | OS-GYLD-2-1, | | | |
| | | | | | | | | | | ZM-ID-5-2, | | | |
| | | | | | | | | | | ZM-MOIST-4-3, | | | |
| | | | | | | | | | | ZM-MOIST-5-4, | | | |
| | | | | | | | | | | ZM-PC-5-1, | | | |
| | | | | | | | | | | ZM-STC-5-1, | | | |
| | | | | | | | | | | ZM-DMC-5-1, | | | |
| | | | | | | | | | | ZM-DMY-4-3, | | | |
| | | | | | | | | | | ZM-GYLD-5-2 | | | |
| 287 | — | — | — | — | X | — | — | X | — | | | | |
| 191 | X | — | — | — | X | — | — | — | — | | | | |
| 215 | — | — | X | — | X | — | — | — | — | | 373 | 387 | TCG |
| | | | | | | | | | | | 972 | 986 | CCG |
| 23 | — | — | — | — | X | X | — | — | — | ZM-MOIST-2-3, | | | |
| | | | | | | | | | | ZM-STC-2-2, | | | |
| | | | | | | | | | | ZM-DMY-2-3, | | | |
| | | | | | | | | | | ZM-DMY-2-4, | | | |
| | | | | | | | | | | ZM-GYLD-2-3 | | | |
| 147 | X | — | — | — | X | — | — | — | — | | | | |
| 345 | — | — | — | — | X | — | — | — | — | | | | |
| 347 | X | — | — | — | X | — | — | — | — | OS-GPDF-1-1, | | | |
| | | | | | | | | | | SMS015-16, | | | |
| | | | | | | | | | | ZM-CL-9-1, | | | |
| | | | | | | | | | | ZM-CPC-3-1, | | | |
| | | | | | | | | | | ZM-CPC-3-3, | | | |
| | | | | | | | | | | ZM-CPC-8-1, | | | |
| | | | | | | | | | | ZM-ID-8-1, | | | |
| | | | | | | | | | | ZM-ID-8-1, | | | |
| | | | | | | | | | | ZM-ID-8-1, | | | |
| | | | | | | | | | | ZM-IVDOM-3-1, | | | |
| | | | | | | | | | | ZM-IVDOM-3-3, | | | |
| | | | | | | | | | | ZM-MOIST-8-1, | | | |
| | | | | | | | | | | ZM-MOIST-8-2, | | | |
| | | | | | | | | | | ZM-MOIST-9-2, | | | |
| | | | | | | | | | | ZM-PC-8-1, | | | |
| | | | | | | | | | | ZM-PC-9-1, | | | |
| | | | | | | | | | | ZM-PR-9-1, | | | |
| | | | | | | | | | | ZM-STC-8-1, | | | |
| | | | | | | | | | | ZM-BIOM-8-1, | | | |
| | | | | | | | | | | ZM-DMC-8-1, | | | |
| | | | | | | | | | | ZM-DMC-8-2, | | | |
| | | | | | | | | | | ZM-DMY-3-2, | | | |
| | | | | | | | | | | ZM-DMY-3-3, | | | |
| | | | | | | | | | | ZM-DMY-8-1, | | | |
| | | | | | | | | | | ZM-DMY-8-2, | | | |
| | | | | | | | | | | ZM-GWE-9-1, | | | |
| | | | | | | | | | | ZM-GWM2-3-1, | | | |
| | | | | | | | | | | ZM-GYHA-8-1, | | | |
| | | | | | | | | | | ZM-GYLD-8-2, | | | |
| | | | | | | | | | | ZM-GYLD-9-1, | | | |
| | | | | | | | | | | ZM-HI-3-1, | | | |
| | | | | | | | | | | ZM-HI-8-1, | | | |
| | | | | | | | | | | ZM-KW100-9-1, | | | |
| | | | | | | | | | | ZM-KW300-3-2, | | | |
| | | | | | | | | | | ZM-KW300-8-2, | | | |
| | | | | | | | | | | ZM-KW300-9-2, | | | |
| | | | | | | | | | | ZM-TGW-9-1, | | | |
| | | | | | | | | | | ZM-TW-8-1, | | | |
| | | | | | | | | | | ZM-YLD-9-1, | | | |
| | | | | | | | | | | ZM-YLD-9-1 | | | |
| 157 | X | — | — | — | X | — | — | — | — | MAS24-2, | 126 | 140 | CCT |
| | | | | | | | | | | ZM-CPC-1-4, | | | |
| | | | | | | | | | | ZM-CPC-1-6, | | | |
| | | | | | | | | | | ZM-MOIST-4-3, | | | |
| | | | | | | | | | | ZM-MOIST-7-3, | | | |
| | | | | | | | | | | ZM-MOIST-7-4, | | | |
| | | | | | | | | | | ZM-MOIST-9-2, | | | |
| | | | | | | | | | | ZM-MOIST-9-2, | | | |
| | | | | | | | | | | ZM-PC-9-1, | | | |
| | | | | | | | | | | ZM-BIOM-3-1, | | | |
| | | | | | | | | | | ZM-DMC-1-2, | | | |
| | | | | | | | | | | ZM-DMY-1-3, | | | |
| | | | | | | | | | | ZM-DMY-1-5, | | | |
| | | | | | | | | | | ZM-DMY-4-3, | | | |
| | | | | | | | | | | ZM-GWM2-3-2, | | | |
| | | | | | | | | | | ZM-GYLD-3-3, | | | |
| | | | | | | | | | | ZM-GYLD-9-1, | | | |
| | | | | | | | | | | ZM-GYUI-9-1, | | | |
| | | | | | | | | | | ZM-GYUI-9-2, | | | |
| | | | | | | | | | | ZM-GYUP-9-2, | | | |
| | | | | | | | | | | ZM-KW100-9-1, | | | |
| | | | | | | | | | | ZM-KW300-9-1, | | | |
| | | | | | | | | | | ZM-KW300-9-2, | | | |
| | | | | | | | | | | ZM-YLD-9-1 | | | |
| 349 | — | — | — | — | X | — | — | — | — | | | | |
| 139 | X | — | — | — | X | — | — | — | — | | | | |
| 175 | X | — | — | — | X | — | — | — | — | | | | |
| 5 | — | — | — | X | X | — | — | — | — | | | | |
| 351 | — | — | — | — | X | — | — | — | — | | | | |
| 353 | X | — | — | — | X | — | — | — | — | | | | |
| 309 | — | — | — | — | X | — | X | — | — | OS-RGT-2-1, | 378 | 392 | CAA |
| | | | | | | | | | | OS-VGT-2-1 | | | |
| 355 | — | — | — | — | X | — | — | — | — | | | | |
| 255 | — | — | — | — | X | — | — | — | X | OS-GW-9-1, | | | |
| | | | | | | | | | | MAS13-24, | | | |
| | | | | | | | | | | MAS13-31, | | | |
| | | | | | | | | | | ZM-CPC-1-3, | | | |
| | | | | | | | | | | ZM-CPC-1-5, | | | |
| | | | | | | | | | | ZM-CPC-7-2, | | | |
| | | | | | | | | | | ZM-CPC-7-3, | | | |
| | | | | | | | | | | ZM-IVDOM-1-2, | | | |
| | | | | | | | | | | ZM-IVDOM-1-4, | | | |
| | | | | | | | | | | ZM-MOIST-1-4, | | | |
| | | | | | | | | | | ZM-MOIST-1-5, | | | |
| | | | | | | | | | | ZM-MOIST-7-1, | | | |
| | | | | | | | | | | ZM-MOIST-7-2, | | | |
| | | | | | | | | | | ZM-PC-1-1, | | | |
| | | | | | | | | | | ZM-STC-7-2, | | | |
| | | | | | | | | | | ZM-BIOM-7-1, | | | |
| | | | | | | | | | | ZM-DMC-1-1, | | | |
| | | | — | | | | | | | ZM-DMY-1-4, | | | |
| | | | | | | | | | | ZM-GWM2-7-1, | | | |
| | | | | | | | | | | ZM-GYLD-7-3, | | | |
| | | | | | | | | | | ZM-GYUP-1-2, | | | |
| | | | | | | | | | | ZM-HI-7-1, | | | |
| | | | | | | | | | | ZM-KW300-1-2, | | | |
| | | | | | | | | | | ZM-TW-1-1 | | | |
| 75 | X | — | — | — | X | — | — | — | — | | | | |
| 357 | — | — | — | — | X | — | — | — | — | | | | |
| 359 | — | — | — | — | X | — | — | — | — | OS-GW-5-1, | | | |
| | | | | | | | | | | OS-YLD-5-1, | | | |
| | | | | | | | | | | ZM-MOIST-4-3, | | | |
| | | | | | | | | | | ZM-DMY-4-3, | | | |
| | | | | | | | | | | ZM-YLD-4-1 | | | |
| 361 | — | — | — | — | X | — | — | — | — | | | | |
| 363 | — | — | — | — | X | — | — | — | — | OS-GW-3-1, | | | |
| | | | | | | | | | | ZM-CPC-1-2, | | | |
| | | | | | | | | | | ZM-IVDOM-1-1, | | | |
| | | | | | | | | | | ZM-IVDOM-9-1, | | | |
| | | | | | | | | | | ZM-IVDOM-9-2, | | | |
| | | | | | | | | | | ZM-MOIST-1-2, | | | |
| | | | | | | | | | | ZM-MOIST-1-2, | | | |
| | | | | | | | | | | ZM-MOIST-9-3, | | | |
| | | | | | | | | | | ZM-DMY-9-1, | | | |
| | | | | | | | | | | ZM-GYHA-1-3, | | | |
| | | | | | | | | | | ZM-GYHA-1-4, | | | |
| | | | | | | | | | | ZM-GYLD-1-1, | | | |
| | | | | | | | | | | ZM-GYLD-9-2, | | | |
| | | | | | | | | | | ZM-GYLD-9-2, | | | |
| | | | | | | | | | | ZM-GYUP-1-1, | | | |
| | | | | | | | | | | ZM-GYUP-1-1, | | | |
| | | | | | | | | | | ZM-HI-1-1, | | | |
| | | | | | | | | | | ZM-KW100-1-2, | | | |
| | | | | | | | | | | ZM-KW100-9-1, | | | |
| | | | | | | | | | | ZM-TGW-9-2, | | | |
| | | | | | | | | | | ZM-TW-9-1, | | | |
| | | | | | | | | | | ZM-YLD-1-1 | | | |
| 365 | — | — | — | — | X | — | — | — | — | | | | |
| 181 | X | — | — | — | X | — | — | — | — | | | | |
| 367 | — | — | — | — | X | — | — | — | — | | | | |
| 261 | — | — | — | — | X | — | — | — | X | | | | |
| 221 | — | — | X | — | X | — | — | — | — | | | | |
| 57 | — | X | — | — | X | — | — | — | — | | | | |
| 25 | — | — | — | — | X | X | — | — | — | | 1047 | 1061 | CGC |
| 369 | — | — | — | — | X | — | — | — | — | OS-CHALK-10-1, | | | |
| | | | | | | | | | | ZM-MOIST-2-3, | | | |
| | | | | | | | | | | ZM-DMY-2-3, | | | |
| | | | | | | | | | | ZM-GYLD-2-3 | | | |
| 39 | — | X | — | — | X | — | — | — | — | | | | |
| 87 | X | — | — | — | X | — | — | — | — | OS-APDF-9-1, | 30 | 44 | CCT |
| | | | | | | | | | | MAS13-24, | 1391 | 1411 | CCG |
| | | | | | | | | | | ZM-CPC-1-3, | | | |
| | | | | | | | | | | ZM-CPC-1-5, | | | |
| | | | | | | | | | | ZM-IVDOM-1-2, | | | |
| | | | | | | | | | | ZM-IVDOM-1-4, | | | |
| | | | | | | | | | | ZM-MOIST-1-4, | | | |
| | | | | | | | | | | ZM-MOIST-1-5, | | | |
| | | | | | | | | | | ZM-MOIST-2-3, | | | |
| | | | | | | | | | | ZM-PC-1-1, | | | |
| | | | | | | | | | | ZM-STC-2-2, | | | |
| | | | | | | | | | | ZM-DMC-1-1, | | | |
| | | | | | | | | | | ZM-DMY-1-1, | | | |
| | | | | | | | | | | ZM-DMY-2-3, | | | |
| | | | | | | | | | | ZM-DMY-2-4, | | | |
| | | | | | | | | | | ZM-GYLD-2-1, | | | |
| | | | | | | | | | | ZM-GYLD-2-3, | | | |
| | | | | | | | | | | ZM-GYUP-1-2, | | | |
| | | | | | | | | | | ZM-KW300-1-2, | | | |
| | | | | | | | | | | ZM-TW-1-1, | | | |
| | | | | | | | | | | ZM-YLD-2-1, | | | |
| | | | | | | | | | | ZM-YLD-2-2 | | | |
| 371 | — | — | — | — | X | — | — | — | — | | | | |
| 163 | X | — | — | — | X | — | — | — | — | | | | |
| 373 | — | — | — | — | X | — | — | — | — | | | | |
| 313 | — | — | — | — | X | — | X | — | — | OS-GW-5-1, | | | |
| | | | | | | | | | | OS-YLD-5-1 | | | |
| 375 | — | — | — | — | X | — | — | — | — | | | | |
| 315 | X | — | — | — | X | — | X | — | — | OS-GPL-4-1, | 683 | 703 | CCG |
| | | | | | | | | | | OS-GPP-4-1, | | | |
| | | | | | | | | | | OS-GYLD-4-1, | | | |
| | | | | | | | | | | MAS24-2, | | | |
| | | | | | | | | | | ZM-CPC-3-2, | | | |
| | | | | | | | | | | ZM-ID-10-1, | | | |
| | | | | | | | | | | ZM-ID-2-1, | | | |
| | | | | | | | | | | ZM-MOIST-10-1, | | | |
| | | | | | | | | | | ZM-MOIST-2-2, | | | |
| | | | | | | | | | | ZM-MOIST-3-2, | | | |
| | | | | | | | | | | ZM-MOIST-9-2, | | | |
| | | | | | | | | | | ZM-PC-9-1, | | | |
| | | | | | | | | | | ZM-STC-10-1, | | | |
| | | | | | | | | | | ZM-BIOM-3-1, | | | |
| | | | | | | | | | | ZM-DMC-10-1, | | | |
| | | | | | | | | | | ZM-DMC-10-2, | | | |
| | | | | | | | | | | ZM-DMC-2-3, | | | |
| | | | | | | | | | | ZM-DMY-10-1, | | | |
| | | | | | | | | | | ZM-DMY-3-1, | | | |
| | | | | | | | | | | ZM-EWT-2-1, | | | |
| | | | | | | | | | | ZM-GWM2-10-1, | | | |
| | | | | | | | | | | ZM-GWM2-3-2, | | | |
| | | | | | | | | | | ZM-GYHA-3-1, | | | |
| | | | | | | | | | | ZM-GYLD-2-2, | | | |
| | | | | | | | | | | ZM-GYLD-3-3, | | | |
| | | | | | | | | | | ZM-GYUI-9-1, | | | |
| | | | | | | | | | | ZM-GYUI-9-2, | | | |
| | | | | | | | | | | ZM-GYUP-9-2, | | | |
| | | | | | | | | | | ZM-HI-10-1, | | | |
| | | | | | | | | | | ZM-KW300-3-3, | | | |
| | | | | | | | | | | ZM-KW300-9-1, | | | |
| | | | | | | | | | | ZM-KW300-9-2, | | | |
| | | | | | | | | | | ZM-TW-10-2, | | | |
| | | | | | | | | | | ZM-TW-2-3 | | | |
| 89 | X | — | — | — | X | — | — | — | — | | | | |
| 377 | — | — | — | — | X | — | — | — | — | | | | |
| 289 | — | — | — | — | X | — | — | X | — | | | | |
| 49 | — | X | — | — | X | — | — | — | — | | | | |
| 153 | X | X | — | — | X | — | — | — | — | | | | |
| 81 | X | — | — | — | X | — | — | — | — | | | | |
| 379 | — | — | — | — | X | — | — | — | — | | 707 | 721 | CGC |
| | | | | | | | | | | | 882 | 902 | GGA |
| 305 | — | — | — | — | X | — | X | — | — | OS-BDV-1-1, | | | |
| | | | | | | | | | | OS-CHALK-1-1, | | | |
| | | | | | | | | | | OS-CPV-1-1, | | | |
| | | | | | | | | | | OS-CSV-1-1, | | | |
| | | | | | | | | | | OS-SBV-1-1, | | | |
| | | | | | | | | | | OS-GP-1-1, | | | |
| | | | | | | | | | | OS-GW-1-2, | | | |
| | | | | | | | | | | OS-YLD-1-1, | | | |
| | | | | | | | | | | ZM-MOIST-1-1, | | | |
| | | | | | | | | | | ZM-MOIST-1-2, | | | |
| | | | | | | | | | | ZM-GYHA-1-2, | | | |
| | | | | | | | | | | ZM-GYHA-1-3, | | | |
| | | | | | | | | | | ZM-GYUP-1-1, | | | |
| | | | | | | | | | | ZM-HI-1-1, | | | |
| | | | | | | | | | | ZM-KW100-1-2 | | | |
| 381 | — | — | — | — | X | — | — | — | — | OS-GPL-4-1, | | | |
| | | | | | | | | | | OS-GPP-4-1, | | | |
| | | | | | | | | | | OS-GYLD-4-1, | | | |
| | | | | | | | | | | MAS24-2, | | | |
| | | | | | | | | | | ZM-CPC-3-2, | | | |
| | | | | | | | | | | ZM-ID-10-1, | | | |
| | | | | | | | | | | ZM-ID-2-1, | | | |
| | | | | | | | | | | ZM-MOIST-10-1, | | | |
| | | | | | | | | | | ZM-MOIST-2-2, | | | |
| | | | | | | | | | | ZM-MOIST-3-2, | | | |
| | | | | | | | | | | ZM-MOIST-9-2, | | | |
| | | | | | | | | | | ZM-PC-9-1, | | | |
| | | | | | | | | | | ZM-STC-10-1, | | | |
| | | | | | | | | | | ZM-BIOM-3-1, | | | |
| | | | | | | | | | | ZM-DMC-10-1, | | | |
| | | | | | | | | | | ZM-DMC-10-2, | | | |
| | | | | | | | | | | ZM-DMC-2-3, | | | |
| | | | | | | | | | | ZM-DMY-10-1, | | | |
| | | | | | | | | | | ZM-DMY-3-1, | | | |
| | | | | | | | | | | ZM-EWT-2-1, | | | |
| | | | | | | | | | | ZM-GWM2-10-1, | | | |
| | | | | | | | | | | ZM-GWM2-3-2, | | | |
| | | | | | | | | | | ZM-GYHA-3-1, | | | |
| | | | | | | | | | | ZM-GYLD-2-2, | | | |
| | | | | | | | | | | ZM-GYLD-3-3, | | | |
| | | | | | | | | | | ZM-GYUI-9-1, | | | |
| | | | | | | | | | | ZM-GYUI-9-2, | | | |
| | | | | | | | | | | ZM-GYUP-9-2, | | | |
| | | | | | | | | | | ZM-HI-10-1, | | | |
| | | | | | | | | | | ZM-KW300-3-3, | | | |
| | | | | | | | | | | ZM-KW300-9-1, | | | |
| | | | | | | | | | | ZM-KW300-9-2, | | | |
| | | | | | | | | | | ZM-TW-10-2, | | | |
| | | | | | | | | | | ZM-TW-2-3 | | | |
| 197 | X | — | — | — | X | — | — | — | — | | | | |
| 45 | — | X | — | — | X | — | — | — | — | | | | |
| 97 | X | — | — | — | X | — | — | — | — | | | | |
| 383 | — | — | — | — | X | — | — | — | — | | | | |
| 135 | X | — | — | — | X | — | — | — | — | | | | |
| 267 | X | — | — | — | X | — | — | — | X | | 217 | 234 | CCG |
| 385 | — | — | — | — | X | — | — | — | — | | 90 | 107 | CGG |
| | | | | | | | | | | | 575 | 592 | CCG |
| 33 | — | X | — | — | X | — | — | — | — | | | | |
| 283 | — | — | — | — | X | — | — | X | — | | 391 | 408 | CGG |
| 53 | — | X | — | — | X | — | — | — | — | | | | |
| 253 | — | — | — | — | X | — | — | — | X | | | | |
| 387 | — | — | — | — | X | — | — | — | — | | | | |
| 295 | — | — | — | — | X | — | — | X | — | OS-GPL-4-1, | | | |
| | | | | | | | | | | OS-GPP-4-1, | | | |
| | | | | | | | | | | OS-GYLD-4-1, | | | |
| | | | | | | | | | | MAS24-2, | | | |
| | | | | | | | | | | ZM-CPC-3-2, | | | |
| | | | | | | | | | | ZM-ID-10-1, | | | |
| | | | | | | | | | | ZM-ID-2-1, | | | |
| | | | | | | | | | | ZM-MOIST-10-1, | | | |
| | | | | | | | | | | ZM-MOIST-2-2, | | | |
| | | | | | | | | | | ZM-MOIST-3-2, | | | |
| | | | | | | | | | | ZM-MOIST-9-2, | | | |
| | | | | | | | | | | ZM-PC-9-1, | | | |
| | | | | | | | | | | ZM-STC-10-1, | | | |
| | | | | | | | | | | ZM-BIOM-3-1, | | | |
| | | | | | | | | | | ZM-DMC-10-1, | | | |
| | | | | | | | | | | ZM-DMC-10-2, | | | |
| | | | | | | | | | | ZM-DMC-2-3, | | | |
| | | | | | | | | | | ZM-DMY-10-1, | | | |
| | | | | | | | | | | ZM-DMY-3-1, | | | |
| | | | | | | | | | | ZM-EWT-2-1, | | | |
| | | | | | | | | | | ZM-GWM2-10-1, | | | |
| | | | | | | | | | | ZM-GWM2-3-2, | | | |
| | | | | | | | | | | ZM-GYHA-3-1, | | | |
| | | | | | | | | | | ZM-GYLD-2-2, | | | |
| | | | | | | | | | | ZM-GYLD-3-3, | | | |
| | | | | | | | | | | ZM-GYUI-9-1, | | | |
| | | | | | | | | | | ZM-GYUI-9-2, | | | |
| | | | | | | | | | | ZM-GYUP-9-2, | | | |
| | | | | | | | | | | ZM-HI-10-1, | | | |
| | | | | | | | | | | ZM-KW300-3-3, | | | |
| | | | | | | | | | | ZM-KW300-9-1, | | | |
| | | | | | | | | | | ZM-KW300-9-2, | | | |
| | | | | | | | | | | ZM-TW-10-2, | | | |
| | | | | | | | | | | ZM-TW-2-3 | | | |
| 389 | — | — | — | — | X | — | — | — | — | | | | |
| 225 | — | — | X | — | X | — | — | — | — | | | | |
| 391 | — | — | — | — | X | — | — | — | — | | | | |
| 167 | X | — | — | — | X | — | — | — | — | OS-GW-3-1, | | | |
| | | | | | | | | | | MAS19-14, | | | |
| | | | | | | | | | | SMS021-79, | | | |
| | | | | | | | | | | ZM-CL-9-1, | | | |
| | | | | | | | | | | ZM-CPC-1-2, | | | |
| | | | | | | | | | | ZM-CPC-6-2, | | | |
| | | | | | | | | | | ZM-ID-8-1, | | | |
| | | | | | | | | | | ZM-ID-8-1, | | | |
| | | | | | | | | | | ZM-IVDOM-1-1, | | | |
| | | | | | | | | | | ZM-IVDOM-1-3, | | | |
| | | | | | | | | | | ZM-IVDOM-9-1, | | | |
| | | | | | | | | | | ZM-IVDOM-9-2, | | | |
| | | | | | | | | | | ZM-MOIST-1-2, | | | |
| | | | | | | | | | | ZM-MOIST-1-3, | | | |
| | | | | | | | | | | ZM-MOIST-4-3, | | | |
| | | | | | | | | | | ZM-MOIST-9-3, | | | |
| | | | | | | | | | | ZM-PC-8-1, | | | |
| | | | | | | | | | | ZM-PC-9-1, | | | |
| | | | | | | | | | | ZM-PR-9-1, | | | |
| | | | | | | | | | | ZM-BIOM-8-1, | | | |
| | | | | | | | | | | ZM-DMC-6-1, | | | |
| | | | | | | | | | | ZM-DMC-8-1, | | | |
| | | | | | | | | | | ZM-DMY-1-2, | | | |
| | | | | | | | | | | ZM-DMY-4-3, | | | |
| | | | | | | | | | | ZM-DMY-8-2, | | | |
| | | | | | | | | | | ZM-DMY-9-1, | | | |
| | | | | | | | | | | ZM-GWE-9-1, | | | |
| | | | | | | | | | | ZM-GYHA-1-1, | | | |
| | | | | | | | | | | ZM-GYHA-1-4, | | | |
| | | | | | | | | | | ZM-GYHA-8-1, | | | |
| | | | | | | | | | | ZM-GYLD-1-1, | | | |
| | | | | | | | | | | ZM-GYLD-1-2, | | | |
| | | | | | | | | | | ZM-GYLD-6-1, | | | |
| | | | | | | | | | | ZM-GYLD-6-4, | | | |
| | | | | | | | | | | ZM-GYLD-9-2, | | | |
| | | | | | | | | | | ZM-GYLD-9-2, | | | |
| | | | | | | | | | | ZM-GYUP-1-1, | | | |
| | | | | | | | | | | ZM-HI-1-1, | | | |
| | | | | | | | | | | ZM-HI-8-1, | | | |
| | | | | | | | | | | ZM-KW100-9-1, | | | |
| | | | | | | | | | | ZM-KW300-8-2, | | | |
| | | | | | | | | | | ZM-TGW-9-1, | | | |
| | | | | | | | | | | ZM-TGW-9-2, | | | |
| | | | | | | | | | | ZM-TW-9-1, | | | |
| | | | | | | | | | | ZM-YLD-1-1, | | | |
| | | | | | | | | | | ZM-YLD-9-1 | | | |
| 137 | X | — | — | — | X | — | — | — | — | | | | |
| 393 | — | — | — | — | X | — | — | — | — | | | | |
| 195 | X | — | — | — | X | — | — | — | — | | | | |
| 263 | — | — | — | — | X | — | — | — | X | | | | |
| 41 | — | X | — | — | X | — | — | — | — | | | | |
| 303 | — | — | — | — | X | — | X | — | — | | | | |
| 223 | — | — | X | — | X | — | — | — | — | | | | |
| 85 | X | — | — | — | X | — | — | — | — | | | | |
| 395 | — | — | — | — | X | — | — | — | — | | | | |
| 129 | X | — | — | — | X | — | — | — | — | OS-ASS-6-2, | | | |
| | | | | | | | | | | MAS24-2, | | | |
| | | | | | | | | | | ZM-ID-5-2, | | | |
| | | | | | | | | | | ZM-MOIST-5-4, | | | |
| | | | | | | | | | | ZM-MOIST-9-2, | | | |
| | | | | | | | | | | ZM-PC-5-1, | | | |
| | | | | | | | | | | ZM-PC-9-1, | | | |
| | | | | | | | | | | ZM-STC-5-1, | | | |
| | | | | | | | | | | ZM-DMC-5-1, | | | |
| | | | | | | | | | | ZM-GYLD-5-2, | | | |
| | | | | | | | | | | ZM-GYUI-9-1, | | | |
| | | | | | | | | | | ZM-GYUI-9-1, | | | |
| | | | | | | | | | | ZM-GYUI-9-2, | | | |
| | | | | | | | | | | ZM-GYUP-9-1, | | | |
| | | | | | | | | | | ZM-GYUP-9-2, | | | |
| | | | | | | | | | | ZM-KW300-9-1, | | | |
| | | | | | | | | | | ZM-KW300-9-2 | | | |
| 103 | X | — | — | — | X | — | — | — | — | | | | |
| 51 | — | X | — | — | X | — | — | — | — | | | | |
| 99 | — | — | — | — | X | — | — | — | — | | | | |
| 69 | X | — | — | — | X | — | — | — | — | | | | |
| 397 | — | — | — | — | X | — | — | — | — | | | | |
| 229 | — | — | X | — | X | — | — | — | — | | | | |
| 399 | — | — | — | — | X | — | — | — | — | | | | |
| 241 | — | — | X | — | X | — | — | — | — | | | | |
| 91 | X | — | — | — | X | — | — | — | — | | | | |
| 401 | — | — | — | — | X | — | — | — | — | | | | |
| 121 | X | — | — | — | X | — | — | — | — | | | | |
| 403 | — | — | — | — | X | — | — | — | — | | | | |
| 187 | X | — | — | — | X | — | — | — | — | | | | |
| 405 | — | — | — | — | X | — | — | — | — | | | | |
| 13 | — | — | — | X | X | — | — | — | — | | | | |
| 243 | — | — | X | — | X | — | — | — | — | | | | |
| 203 | X | — | — | — | X | — | — | — | — | | 441 | 455 | CGG |
| 407 | — | — | — | — | X | — | — | — | — | | | | |
| 409 | — | — | — | — | X | — | — | — | — | | | | |
| 411 | — | — | — | — | X | — | — | — | — | | 243 | 260 | CAG |
| 105 | X | — | — | — | X | — | — | — | — | | | | |
| 107 | X | — | — | — | X | — | — | — | — | | 235 | 255 | GAG |
| 115 | X | — | — | — | X | — | — | — | — | | 1449 | 1463 | CGG |
| 15 | — | — | — | X | X | — | — | — | — | | | | |
| 165 | X | — | — | — | X | — | — | — | — | | | | |
| 123 | X | — | — | — | X | — | — | — | — | | | | |
| 205 | X | — | — | — | X | — | — | — | — | | | | |
| 63 | — | X | — | — | X | — | — | — | — | | | | |
| 413 | — | — | — | — | X | — | — | — | — | | 146 | 160 | CGG |
| 209 | X | — | — | — | X | — | — | — | — | | | | |
| 323 | — | — | — | — | X | — | X | — | — | | 129 | 143 | CGG |
| | | | | | | | | | | | 368 | 385 | CCG |
| 77 | X | — | — | — | X | — | — | — | — | | | | |
| 415 | — | — | — | — | X | — | — | — | — | | | | |
| 141 | X | — | — | — | X | — | — | — | — | | 128 | 148 | CCT |
| 27 | — | — | — | — | X | X | — | — | — | | | | |
| 65 | — | X | — | — | X | — | — | — | — | | | | |
| 185 | X | — | — | — | X | — | — | — | — | | | | |
| 299 | — | — | — | — | X | — | — | X | — | | 5 | 22 | CGG |
| 67 | — | X | — | — | X | — | — | — | — | | | | |
| 17 | — | — | — | X | X | — | — | — | — | | | | |
| 279 | — | — | — | — | X | — | — | — | X | | | | |
| 71 | X | — | — | — | X | — | — | — | — | | | | |
| 207 | X | — | — | — | X | — | — | — | — | | 8 | 25 | CCG |
| 417 | — | — | — | — | X | — | — | — | — | | | | |
| 127 | X | — | — | — | X | — | — | — | — | | | | |
| 125 | X | — | — | — | X | — | — | — | — | | | | |
| 117 | X | — | — | — | X | — | — | — | — | | | | |
| 183 | X | — | — | — | X | — | — | — | — | | | | |
| 419 | — | — | — | — | X | — | — | — | — | | | | |
| 421 | — | — | — | — | X | — | — | — | — | | | | |
| 29 | — | — | — | — | X | X | — | — | — | | | | |
| 297 | — | — | — | — | X | — | — | X | — | | | | |
| 423 | — | — | — | — | X | — | — | — | — | | 921 | 936 | AG |
| 425 | — | — | — | — | X | — | — | — | — | | | | |
| 245 | — | — | X | — | X | — | — | — | — | | | | |
| 427 | — | — | — | — | X | — | — | — | — | | | | |
| 429 | — | — | — | — | X | — | — | — | — | | | | |
| 247 | — | — | X | — | X | — | — | — | — | | | | |
| 249 | — | — | X | — | X | — | — | — | — | | | | |
| 159/171 | — | — | X | — | — | — | — | | | | | | |
| X | | | | | | | | | | | | | |
| 31 | — | X | — | — | X | — | — | — | — | | | | |
| 275 | — | — | — | — | X | — | — | — | X | | 217 | 234 | GGC |
| | | | | | | | | | | | 753 | 767 | CGG |
| 19 | — | — | — | — | X | X | — | — | — | | | | |
| 151 | X | — | — | — | X | — | — | — | — | | | | |
| 213/227- | X | — | X | — | — | — | — | | | OS-FLLEN-9-1, | 339 | 353 | GTC |
| | | | | | | | | | | OS-GW100-4-1, | 434 | 448 | AGC |
| | | | | | | | | | | MAS24-2, | | | |
| | | | | | | | | | | MAS24-3, | | | |
| | | | | | | | | | | ZM-CPC-1-4, | | | |
| | | | | | | | | | | ZM-CPC-1-6, | | | |
| | | | | | | | | | | ZM-CPC-10-1, | | | |
| | | | | | | | | | | ZM-IVDOM-10-1, | | | |
| | | | | | | | | | | ZM-IVDOM-10-2 | | | |
| | | | | | | | | | | ZM-MOIST-1-1, | | | |
| | | | | | | | | | | ZM-MOIST-9-2, | | | |
| | | | | | | | | | | ZM-PC-9-1, | | | |
| | | | | | | | | | | ZM-STC-10-2, | | | |
| | | | | | | | | | | ZM-STC-2-2, | | | |
| | | | | | | | | | | ZM-DMC-1-2, | | | |
| | | | | | | | | | | ZM-DMY-1-3, | | | |
| | | | | | | | | | | ZM-DMY-1-5, | | | |
| | | | | | | | | | | ZM-DMY-2-4, | | | |
| | | | | | | | | | | ZM-GYHA-1-2, | | | |
| | | | | | | | | | | ZM-GYUI-9-1, | | | |
| | | | | | | | | | | ZM-GYUI-9-1, | | | |
| | | | | | | | | | | ZM-GYUI-9-2, | | | |
| | | | | | | | | | | ZM-GYUP-9-1, | | | |
| | | | | | | | | | | ZM-GYUP-9-2, | | | |
| | | | | | | | | | | ZM-HI-1-1, | | | |
| | | | | | | | | | | ZM-KW300-9-1, | | | |
| | | | | | | | | | | ZM-KW300-9-2 | | | |
| 237 | — | — | X | — | X | — | — | — | — | | | | |
| 133 | X | — | — | — | X | — | X | — | — | | | | |
| 239 | — | — | X | — | X | — | — | — | — | | | | |
| 161 | X | — | — | — | X | — | — | — | — | | | | |
| 61 | X | — | — | — | X | — | — | — | — | | | | |
| 47 | — | X | — | — | X | — | — | — | — | | | | |
| 219 | — | — | X | — | X | — | — | — | — | | | | |
| 259/271- | — | — | X | — | — | — | X | | | | | | |
| 93 | X | — | — | — | X | — | — | — | — | OS-AE-12-1 | | | |
| 111 | X | — | — | — | X | — | — | — | — | | 275 | 289 | GCG |
| 73 | X | — | — | — | X | — | — | — | — | | 54 | 74 | CGG |
| 235 | — | — | X | — | X | — | — | — | — | | | | |
| 217 | — | — | X | — | X | — | — | — | — | | | | |
| 257 | — | — | — | — | X | — | — | — | X | | | | |
| 201 | X | — | — | — | X | — | — | — | — | OS-AMY-6-1, | | | |
| | | | | | | | | | | OS-AMY-6-2, | | | |
| | | | | | | | | | | OS-ASS-6-1, | | | |
| | | | | | | | | | | OS-GC-6-1, | | | |
| | | | | | | | | | | OS-BDV-6-1, | | | |
| | | | | | | | | | | OS-CHALK-6-1, | | | |
| | | | | | | | | | | OS-CPV-6-1, | | | |
| | | | | | | | | | | OS-CPV-6-2, | | | |
| | | | | | | | | | | OS-CSV-6-1, | | | |
| | | | | | | | | | | OS-CSV-6-2, | | | |
| | | | | | | | | | | OS-HPV-6-1, | | | |
| | | | | | | | | | | OS-HPV-6-2, | | | |
| | | | | | | | | | | OS-SBV-6-1, | | | |
| | | | | | | | | | | OS-WC-6-1, | | | |
| | | | | | | | | | | OS-DM-6-1, | | | |
| | | | | | | | | | | OS-GP-6-1, | | | |
| | | | | | | | | | | OS-Y-6-1, | | | |
| | | | | | | | | | | MAS24-2, | | | |
| | | | | | | | | | | ZM-CPC-6-2, | | | |
| | | | | | | | | | | ZM-ID-10-1, | | | |
| | | | | | | | | | | ZM-MOIST-10-1, | | | |
| | | | | | | | | | | ZM-MOIST-9-2, | | | |
| | | | | | | | | | | ZM-MOIST-9-2, | | | |
| | | | | | | | | | | ZM-PC-9-1, | | | |
| | | | | | | | | | | ZM-STC-10-1, | | | |
| | | | | | | | | | | ZM-DMC-10-1, | | | |
| | | | | | | | | | | ZM-DMC-10-2, | | | |
| | | | | | | | | | | ZM-DMC-6-1, | | | |
| | | | | | | | | | | ZM-DMC-6-2, | | | |
| | | | | | | | | | | ZM-DMY-10-1, | | | |
| | | | | | | | | | | ZM-GWM2-10-1, | | | |
| | | | | | | | | | | ZM-GYLD-6-1, | | | |
| | | | | | | | | | | ZM-GYLD-6-4, | | | |
| | | | | | | | | | | ZM-GYLD-6-4, | | | |
| | | | | | | | | | | ZM-GYLD-9-1, | | | |
| | | | | | | | | | | ZM-GYUI-9-1, | | | |
| | | | | | | | | | | ZM-GYUI-9-2, | | | |
| | | | | | | | | | | ZM-GYUP-9-2, | | | |
| | | | | | | | | | | ZM-HI-10-1, | | | |
| | | | | | | | | | | ZM-KW100-9-1, | | | |
| | | | | | | | | | | ZM-KW300-9-1, | | | |
| | | | | | | | | | | ZM-KW300-9-2, | | | |
| | | | | | | | | | | ZM-TW-10-2, | | | |
| | | | | | | | | | | ZM-YLD-6-1, | | | |
| | | | | | | | | | | ZM-YLD-9-1 | | | |
| 281 | — | — | — | — | X | — | — | X | — | | | | |
| 251 | — | — | — | — | X | — | — | — | X | | | | |
| 3 | — | — | — | X | X | — | — | — | — | OS-AE-11-1, | 24 | 38 | CGC |
| | | | | | | | | | | ZM-MOIST-1-6, | | | |
| | | | | | | | | | | ZM-MOIST-5-1, | | | |
| | | | | | | | | | | ZM-PC-1-2, | | | |
| | | | | | | | | | | ZM-GWM2-1-1, | | | |
| | | | | | | | | | | ZM-GYHA-5-1, | | | |
| | | | | | | | | | | ZM-GYLD-5-3, | | | |
| | | | | | | | | | | ZM-HI-1-2, | | | |
| | | | | | | | | | | ZM-KW100-1-2 | | | |
| 21 | — | — | — | — | X | X | — | — | — | OS-AE-12-1 | | | |
| 179 | X | — | — | — | X | — | — | — | — | | | | |
| 319 | X | — | — | — | X | — | X | — | — | | 41 | 55 | CCG |
| 7 | — | — | — | X | X | — | — | — | — | | | | |
| 291 | — | — | — | — | X | — | — | X | — | | 10 | 24 | GAG |
| 169 | X | — | — | — | X | — | — | — | — | | | | |
| 83 | X | — | — | — | X | — | — | — | — | | | | |
| 269 | — | — | — | — | X | — | — | — | X | | | | |
| 9 | — | — | — | X | X | — | — | — | — | OS-GPL-4-1, | | | |
| | | | | | | | | | | OS-GPP-4-1, | | | |
| | | | | | | | | | | OS-GYLD-4-1, | | | |
| | | | | | | | | | | MAS24-2, | | | |
| | | | | | | | | | | MAS24-28, | | | |
| | | | | | | | | | | ZM-CPC-3-2, | | | |
| | | | | | | | | | | ZM-ID-10-1, | | | |
| | | | | | | | | | | ZM-ID-2-1, | | | |
| | | | | | | | | | | ZM-MOIST-10-1, | | | |
| | | | | | | | | | | ZM-MOIST-2-2, | | | |
| | | | | | | | | | | ZM-MOIST-3-2, | | | |
| | | | | | | | | | | ZM-MOIST-4-3, | | | |
| | | | | | | | | | | ZM-MOIST-5-3, | | | |
| | | | | | | | | | | ZM-MOIST-9-2, | | | |
| | | | | | | | | | | ZM-PC-9-1, | | | |
| | | | | | | | | | | ZM-STC-10-1, | | | |
| | | | | | | | | | | ZM-BIOM-3-1, | | | |
| | | | | | | | | | | ZM-DMC-10-1, | | | |
| | | | | | | | | | | ZM-DMC-10-2, | | | |
| | | | | | | | | | | ZM-DMC-2-3, | | | |
| | | | | | | | | | | ZM-DMY-10-1, | | | |
| | | | | | | | | | | ZM-DMY-3-1, | | | |
| | | | | | | | | | | ZM-DMY-4-3, | | | |
| | | | | | | | | | | ZM-EWT-2-1, | | | |
| | | | | | | | | | | ZM-GWM2-10-1, | | | |
| | | | | | | | | | | ZM-GWM2-3-2, | | | |
| | | | | | | | | | | ZM-GYHA-3-1, | | | |
| | | | | | | | | | | ZM-GYLD-2-2, | | | |
| | | | | | | | | | | ZM-GYLD-3-3, | | | |
| | | | | | | | | | | ZM-GYLD-5-2, | | | |
| | | | | | | | | | | ZM-GYUI-9-1, | | | |
| | | | | | | | | | | ZM-GYUI-9-2, | | | |
| | | | | | | | | | | ZM-GYUP-9-2, | | | |
| | | | | | | | | | | ZM-HI-10-1, | | | |
| | | | | | | | | | | ZM-KW300-3-3, | | | |
| | | | | | | | | | | ZM-KW300-9-1, | | | |
| | | | | | | | | | | ZM-KW300-9-2, | | | |
| | | | | | | | | | | ZM-TW-10-2, | | | |
| | | | | | | | | | | ZM-TW-2-3 | | | |
| 449 | — | — | — | — | X | — | — | — | X | | | | |
| 277 | — | — | — | — | X | — | — | — | X | | 664 | 681 | ACT |
| 285 | — | — | — | — | X | — | — | X | — | OS-PGWC-8-1, | | | |
| | | | | | | | | | | OS-FLWID-3-1, | | | |
| | | | | | | | | | | OS-GPP-8-2, | | | |
| | | | | | | | | | | SMS015-9, | | | |
| | | | | | | | | | | ZM-CPC-1-3, | | | |
| | | | | | | | | | | ZM-CPC-1-5, | | | |
| | | | | | | | | | | ZM-IVDOM-1-2, | | | |
| | | | | | | | | | | ZM-IVDOM-1-3, | | | |
| | | | | | | | | | | ZM-MOIST-1-3, | | | |
| | | | | | | | | | | ZM-MOIST-1-4, | | | |
| | | | | | | | | | | ZM-MOIST-4-2, | | | |
| | | | | | | | | | | ZM-MOIST-4-3, | | | |
| | | | | | | | | | | ZM-PC-1-1, | | | |
| | | | | | | | | | | ZM-DMC-1-1, | | | |
| | | | | | | | | | | ZM-DMY-1-2, | | | |
| | | | | | | | | | | ZM-DMY-1-4, | | | |
| | | | | | | | | | | ZM-DMY-4-3, | | | |
| | | | | | | | | | | ZM-GYHA-1-1, | | | |
| | | | | | | | | | | ZM-GYLD-1-2, | | | |
| | | | | | | | | | | ZM-GYUP-1-2, | | | |
| | | | | | | | | | | M-TW-1-1 | | | |
| 325 | — | — | — | — | X | — | X | — | — | OS-PGWC-8-1, | | | |
| | | | | | | | | | | OS-FLWID-3-1, | | | |
| | | | | | | | | | | OS-GPL-8-2, | | | |
| | | | | | | | | | | OS-GPP-8-2, | | | |
| | | | | | | | | | | OS-GYLD-8-2, | | | |
| | | | | | | | | | | ZM-CPC-1-3, | | | |
| | | | | | | | | | | ZM-CPC-1-5, | | | |
| | | | | | | | | | | ZM-IVDOM-1-2 | | | |
| | | | | | | | | | | ZM-IVDOM-1-3 | | | |
| | | | | | | | | | | ZM-MOIST-1-3, | | | |
| | | | | | | | | | | ZM-MOIST-1-4, | | | |
| | | | | | | | | | | ZM-PC-1-1, | | | |
| | | | | | | | | | | ZM-DMC-1-1, | | | |
| | | | | | | | | | | ZM-DMY-1-2, | | | |
| | | | | | | | | | | ZM-DMY-1-4, | | | |
| | | | | | | | | | | ZM-GYHA-1-1, | | | |
| | | | | | | | | | | ZM-GYLD-1-2, | | | |
| | | | | | | | | | | ZM-GYUP-1-2, | | | |
| | | | | | | | | | | ZM-TW-1-1 | | | |
| 265 | — | — | — | — | X | — | — | — | X | OS-FLLEN-3-1, | 65 | 79 | CGG |
| | | | | | | | | | | OS-GPL-2-1, | | | |
| | | | | | | | | | | OS-GYLD-2-1, | | | |
| | | | | | | | | | | MAS24-21, | | | |
| | | | | | | | | | | ZM-ID-5-2, | | | |
| | | | | | | | | | | ZM-MOIST-4-3, | | | |
| | | | | | | | | | | ZM-MOIST-4-4, | | | |
| | | | | | | | | | | ZM-MOIST-5-4, | | | |
| | | | | | | | | | | ZM-PC-5-1, | | | |
| | | | | | | | | | | ZM-STC-5-1, | | | |
| | | | | | | | | | | ZM-DMC-5-1, | | | |
| | | | | | | | | | | ZM-DMY-4-2, | | | |
| | | | | | | | | | | ZM-DMY-4-3, | | | |
| | | | | | | | | | | ZM-DMY-4-4, | | | |
| | | | | | | | | | | ZM-EWT-4-2, | | | |
| | | | | | | | | | | ZM-GYLD-4-1, | | | |
| | | | | | | | | | | ZM-GYLD-5-2, | | | |
| | | | | | | | | | | ZM-HI-4-1, | | | |
| | | | | | | | | | | ZM-KNE-4-1, | | | |
| | | | | | | | | | | ZM-KW300-4-2, | | | |
| | | | | | | | | | | ZM-KWE-4-1, | | | |
| | | | | | | | | | | M-TGW-4-1 | | | |
| 327 | — | — | — | | X | — | X | | | | | | |
| 231 | — | — | X | — | X | — | — | — | — | ZM-MOIST-2-3, | | | |
| | | | | | | | | | | ZM-MOIST-4-3, | | | |
| | | | | | | | | | | ZM-STC-2-2, | | | |
| | | | | | | | | | | ZM-DMY-2-3, | | | |
| | | | | | | | | | | ZM-DMY-2-4, | | | |
| | | | | | | | | | | ZM-DMY-4-3, | | | |
| | | | | | | | | | | M-GYLD-2-3 | | | |
| 37 | — | X | — | — | X | — | — | — | — | | | | |
| 43 | — | X | — | — | X | — | — | — | — | ZM-DMY-4-1 | | | |
| 293 | — | — | — | — | X | — | — | X | — | OS-CIF-6-1, | | | |
| | | | | | | | | | | MAS13-32, | | | |
| | | | | | | | | | | ZM-CPC-1-3, | | | |
| | | | | | | | | | | ZM-CPC-1-5, | | | |
| | | | | | | | | | | ZM-IVDOM-1-2, | | | |
| | | | | | | | | | | ZM-MOIST-1-4, | | | |
| | | | | | | | | | | ZM-MOIST-2-1, | | | |
| | | | | | | | | | | ZM-MOIST-9-2, | | | |
| | | | | | | | | | | ZM-PC-1-1, | | | |
| | | | | | | | | | | ZM-DMC-1-1, | | | |
| | | | | | | | | | | ZM-DMY-1-4, | | | |
| | | | | | | | | | | ZM-DMY-2-1, | | | |
| | | | | | | | | | | ZM-GYLD-2-4, | | | |
| | | | | | | | | | | ZM-GYLD-9-1, | | | |
| | | | | | | | | | | ZM-GYUP-1-2, | | | |
| | | | | | | | | | | ZM-KW100-9-1, | | | |
| | | | | | | | | | | ZM-KW300-9-2, | | | |
| | | | | | | | | | | ZM-TW-1-1, | | | |
| | | | | | | | | | | ZM-YLD-9-1 | | | |
| 321 | X | — | — | — | X | — | X | — | — | ZM-CPC-6-2, | 536 | 550 | CTG |
| | | | | | | | | | | ZM-DMC-6-1, | | | |
| | | | | | | | | | | ZM-DMC-6-2, | | | |
| | | | | | | | | | | ZM-GYLD-6-1, | | | |
| | | | | | | | | | | ZM-GYLD-6-4, | | | |
| | | | | | | | | | | ZM-GYLD-6-4, | | | |
| | | | | | | | | | | ZM-YLD-6-1 | | | |
| 79 | X | — | — | — | X | — | — | — | — | OS-AMY-5-1 | | | |
| 211 | — | — | X | — | X | — | — | — | — | OS-APDF-9-1, | | | |
| | | | | | | | | | | OS-VGT-9-1, | | | |
| | | | | | | | | | | OS-GW-9-1 | | | |
| 177 | X | — | — | — | X | — | — | — | — | OS-CIF-6-1 | 44 | 58 | CGT |
| | | | | | | | | | | | 117 | 131 | GGA |

[0691] TABLE 3
Table 3 provides a further subset of rice genes the expression
of which is up-regulated during grain filling. Further identified
are SSR sequences in the coding region of the rice genes.

A = structural protein
B = hypothetical/unknown proteins
C = Growth/division and development
D = classification not clear
E = Cereal_Grain_Filling_QTLs (a description of the respective QTLs is provided in
Table . . . below)
F = Beginning of the SSR
G = End of the SSR
H = Nucleotide Sequence of the trinucleotide repeat unit

| SEQ ID | A | B | C | D | E | F | G | H |
|---|---|---|---|---|---|---|---|---|
| 329 | — | X | — | — | | | | |
| 331 | — | — | — | X | | | | |
| 332 | X | — | — | — | | | | |
| 333 | — | X | — | — | | | | |
| 334 | — | X | — | — | | | | |
| 335 | — | X | — | — | | | | |
| 343 | — | — | — | X | | | | |
| 23 | — | X | — | — | | | | |
| 345 | — | X | — | — | | | | |
| 351 | — | X | — | — | | | | |
| 355 | — | X | — | — | | | | |
| 357 | — | X | — | — | | | | |
| 361 | — | X | — | — | | | | |
| 363 | — | X | — | — | | | | |
| 365 | — | — | — | X | | | | |
| 369 | — | — | — | X | | | | |
| 371 | — | — | X | — | | | | |
| 373 | — | X | — | — | | | | |
| 313 | — | X | — | — | | | | |
| 375 | — | X | — | — | | | | |
| 377 | — | X | — | — | | | | |
| 379 | — | X | — | — | | | | |
| 381 | — | — | — | X | | | | |
| 383 | — | X | — | — | | | | |
| 387 | — | X | — | — | | | | |
| 389 | — | X | — | — | | | | |
| 393 | — | X | — | — | | | | |
| 395 | — | X | — | — | | | | |
| 99 | — | — | — | X | | | | |
| 397 | — | X | — | — | | | | |
| 229 | — | X | — | — | | | | |
| 403/431- | — | — | | | | 16 | 39 | CCG |
| 433 | — | X | — | — | OS-AMY-5-1, | | | |
| | | | | | MAS13-31, | | | |
| | | | | | SMS021-80, | | | |
| | | | | | ZM-CPC-5-1, | | | |
| | | | | | ZM-CPC-7-2, | | | |
| | | | | | ZM-IVDOM-5-1, | | | |
| | | | | | ZM-IVDOM-5-2, | | | |
| | | | | | ZM-MOIST-5-2, | | | |
| | | | | | ZM-MOIST-5-2, | | | |
| | | | | | ZM-MOIST-5-3, | | | |
| | | | | | ZM-MOIST-7-1, | | | |
| | | | | | ZM-BIOM-5-1, | | | |
| | | | | | ZM-BIOM-7-1, | | | |
| | | | | | ZM-DMY-5-1, | | | |
| | | | | | ZM-GWM2-7-1, | | | |
| | | | | | ZM-GYLD-5-1, | | | |
| | | | | | ZM-GYLD-5-3, | | | |
| | | | | | ZM-HI-7-1, | | | |
| | | | | | ZM-KW300-5-1, | | | |
| | | | | | ZM-TW-5-1 | | | |
| 435 | — | — | — | X | | | | |
| 437 | — | X | — | — | | | | |
| 439 | — | X | — | — | OS-YLD-3-2, | | | |
| | | | | | ZM-ID-5-1, | | | |
| | | | | | ZM-IVDOM-5-3, | | | |
| | | | | | ZM-GYLD-5-3 | | | |
| 441 | — | — | — | X | OS-REGEN-5-1, | 1912 | 1929 | CGG |
| | | | | | MAS12-18, | | | |
| | | | | | MAS24-16, | | | |
| | | | | | SMS015-16, | | | |
| | | | | | SMS021-81, | | | |
| | | | | | ZM-ID-6-1, | | | |
| | | | | | ZM-ID-6-1, | | | |
| | | | | | ZM-ID-8-1, | | | |
| | | | | | ZM-ID-8-1, | | | |
| | | | | | ZM-ID-8-1, | | | |
| | | | | | ZM-MOIST-5-1, | | | |
| | | | | | ZM-MOIST-6-2, | | | |
| | | | | | ZM-PC-8-1, | | | |
| | | | | | ZM-STC-6-1, | | | |
| | | | | | ZM-STC-8-1, | | | |
| | | | | | ZM-VT-6-1, | | | |
| | | | | | ZM-BIOM-8-1, | | | |
| | | | | | ZM-DMC-8-1, | | | |
| | | | | | ZM-DMY-8-1, | | | |
| | | | | | ZM-DMY-8-2, | | | |
| | | | | | ZM-GYHA-5-1, | | | |
| | | | | | ZM-GYHA-6-1, | | | |
| | | | | | ZM-GYLD-5-3, | | | |
| | | | | | ZM-GYLD-6-2, | | | |
| | | | | | ZM-GYLD-6-3, | | | |
| | | | | | ZM-HI-8-1, | | | |
| | | | | | ZM-KW300-6-2 | | | |
| 443 | — | — | — | X | OS-RGT-12-2, | 117 | 131 | CGG |
| | | | | | OS-GWPL-12-1 | 1962 | 1979 | CGG |
| 445 | — | X | — | — | | | | |
| 447 | — | X | — | — | OS-YLD-3-2 | | | |
| 95 | — | — | — | X | OS-CIF-8-1, | | | |
| | | | | | OS-GW-8-1, | | | |
| | | | | | MAS13-24, | | | |
| | | | | | ZM-CPC-1-3, | | | |
| | | | | | ZM-CPC-1-5, | | | |
| | | | | | ZM-IVDOM-1-2, | | | |
| | | | | | ZM-IVDOM-1-4, | | | |
| | | | | | ZM-MOIST-1-4, | | | |
| | | | | | ZM-MOIST-1-5, | | | |
| | | | | | ZM-PC-1-1, | | | |
| | | | | | ZM-DMC-1-1, | | | |
| | | | | | ZM-DMC-6-2, | | | |
| | | | | | ZM-DMY-1-4, | | | |
| | | | | | ZM-GYLD-6-4, | | | |
| | | | | | ZM-GYUP-1-2, | | | |
| | | | | | ZM-KW300-1-2, | | | |
| | | | | | ZM-TW-1-1, | | | |
| | | | | | ZM-YLD-6-1 | | | |
| 451 | — | X | — | — | OS-PGWC-12-1, | 962 | 976 | GCA |
| | | | | | OS-BDV-12-1, | | | |
| | | | | | OS-PKV-12-1 | | | |
| 453 | — | X | — | — | | 27 | 47 | CCT |
| | | | | | | 344 | 358 | GCG |
| 455 | — | X | — | — | MAS24-28, | | | |
| | | | | | ZM-ID-10-1, | | | |
| | | | | | ZM-ID-2-1, | | | |
| | | | | | ZM-MOIST-10-1, | | | |
| | | | | | ZM-MOIST-2-2, | | | |
| | | | | | ZM-MOIST-4-3, | | | |
| | | | | | ZM-MOIST-5-3, | | | |
| | | | | | ZM-STC-10-1, | | | |
| | | | | | ZM-DMC-10-1, | | | |
| | | | | | ZM-DMC-10-2, | | | |
| | | | | | ZM-DMC-2-3, | | | |
| | | | | | ZM-DMY-10-1, | | | |
| | | | | | ZM-DMY-4-3, | | | |
| | | | | | ZM-EWT-2-1, | | | |
| | | | | | ZM-GWM2-10-1, | | | |
| | | | | | ZM-GYLD-2-2, | | | |
| | | | | | ZM-GYLD-5-2, | | | |
| | | | | | ZM-HI-10-1, | | | |
| | | | | | ZM-TW-10-2, | | | |
| | | | | | ZM-TW-2-3 | | | |
| 457 | — | X | — | — | | | | |
| 459 | — | X | — | — | OS-PGWC-12-1, | 53 | 73 | CGG |
| | | | | | OS-BDV-12-1, | | | |
| | | | | | OS-PKV-12-1 | | | |
| 461 | — | X | — | — | OS-GW-11-1, | | | |
| | | | | | ZM-IVDOM-9-1, | | | |
| | | | | | ZM-IVDOM-9-2, | | | |
| | | | | | ZM-GYLD-9-2, | | | |
| | | | | | ZM-KW100-9-1, | | | |
| | | | | | ZM-TGW-9-2 | | | |

[0692] TABLE 4
Genes involved in rice grain filling, which belong to
the functional category of stress response proteins

| Rice | Banana | Wheat | Maize | |
|---|---|---|---|---|
| (SEQ | (SEQ | (SEQ | (SEQ | |
| ID | ID | ID | ID | |
| NO) | NO) | NO) | NO) | Gene Description |
| 1 | — | 1065 | 1182 | Similar to MPV1_HUMAN |
| | | | | P39210 HOMO SAPIENS |
| | | | | (HUMAN). MPV17 PROTEIN. |
| 3 | | | 1115 | Similar to ANRX_ANASP |
| | | | | Q44141 ANABAENA SP. |
| | | | | (STRAIN PCC 7120). |
| | | | | ANAREDOXIN. |
| 5 | 939 | 1030 | 1184 | Similar to |
| | | | | gi\|20286\|emb\|CAA46916.1\| |
| | | | | peroxidase [Oryza sativa] |
| 7 | 935 | 1037 | — | Similar to |
| | | | | gi\|1620753\|gb\|AAB17095.1\| |
| | | | | proteinase inhibitor |
| | | | | [Oryza sativa] |
| 9 | 934 | 1011 | 1110 | Similar to |
| | | | | gi\|3287683\|gb\|AAC25511.1\| |
| | | | | Similar to apoptosis |
| | | | | protein MA-3 |
| | | | | gb\|D50465 from Mus |
| | | | | musculus. [Arabidopsis |
| | | | | thaliana] |
| 11 | — | 952 | 1198 | Similar to |
| | | | | gi\|5725430\|emb\|CAB52439.1\| |
| | | | | stress responsive protein |
| | | | | homolog [Arabidopsis |
| | | | | thaliana] |
| 13 | — | 998 | 1175 | |
| 15 | — | 1015 | 1167 | |
| 17 | 899 | 1042 | 1161 | |

[0693] TABLE 5
Genes involved in rice grain filling, which belong
to the functional category of signaling molecules

| Rice | Banana | Wheat | Maize | |
|---|---|---|---|---|
| (SEQ | (SEQ | (SEQ | (SEQ | |
| ID | ID | ID | ID | |
| NO) | NO) | NO) | NO) | Gene Description |
| 19 | — | 1089 | — | Similar to |
| | | | | gi\|1352683\|sp\|P49599\| |
| | | | | P2C3_ARATH PROTEIN |
| | | | | PHOSPHATASE 2C PPH1 (PP2C) |
| 21 | — | 971 | — | Similar to |
| | | | | gi\|7269803\|emb\|CAB79663.1\| |
| | | | | serine/threonine-specific |
| | | | | kinase like protein |
| | | | | [Arabidopsis thaliana] |
| 23 | | | | Similar to |
| | | | | gi\|6520139\|dbj\| |
| | | | | BAA87936.1\| ZW9 |
| | | | | [Arabidopsis thaliana] |
| 25 | — | 1071 | 1120 | Similar to |
| | | | | gi\|9293975\|dbj\| |
| | | | | BAB01878.1\| receptor |
| | | | | protein kinase |
| | | | | [Arabidopsis thaliana] |
| 27 | 916 | 1049 | — | |
| 29 | — | 984 | 1186 | |

[0694] TABLE 6
Genes involved in rice grain filling, which belong to
the functional category of transmembrane proteins

| Rice | Banana | Wheat | Banana | |
|---|---|---|---|---|
| (SEQ | (SEQ | (SEQ | (SEQ | |
| ID | ID | ID | ID | |
| NO | NO) | NO) | NO) | Gene Description |
| 31 | — | 1025 | — | (nitrite transporter) |
| 33 | — | 1047 | — | (amino a selective |
| | | | | channel protein) |
| 35 | 950 | 959 | 1164 | (G6P transporter in |
| | | | | plastids) |
| 37 | | | | (PTR2 POT family) |
| 39 | 949 | 1017 | — | (Leucine rich protein) |
| 41 | 927 | 962 | 1112 | (immunoglobulin) |
| 43 | 917 | 982 | 1109 | (dehydrogenase) |
| 45 | — | 954 | 1117 | (putative transport |
| | | | | protein) |
| 47 | 921 | 1099 | 1152 | (phosphate transporter) |
| 49 | 891 | 1040 | 1128 | (monosaccarid (hexose) |
| | | | | transporter) |
| 51 | — | 994 | — | (PTR2 POT family) |
| 53 | — | 1067 | 1159 | (cation transporter |
| | | | | protein Ec) |
| 55 | — | 1047 | — | (amino a selective |
| | | | | channel protein) |
| 57 | | | | (sugar transporter) |
| 59 | — | 1077 | — | (transporter protein) |
| 61 | — | 1085 | — | Similarity[ab043024_34-1656 |
| | | | | /codon_start = 1 |
| | | | | /db_xref = “gi: 8051712” / |
| | | | | product = “sodium sulfate |
| | | | | or dicarboxylate transporter” |
| | | | | /protein_id = “baa96091.1” ] |
| | | | | Evidence[100% (1510/1510)] |
| 63 | — | 1105 | — | Similar to |
| | | | | gi\|7523692\|gb\|AAF63131.1\| |
| | | | | AC011001_1 Putative |
| | | | | chloroplast inner |
| | | | | envelope protein |
| | | | | [Arabidopsis thaliana] |
| 65 | — | 957 | 1114 | Similar to PITH_STRHA |
| | | | | P41132 STREPTOMYCES |
| | | | | HALSTEDII. PUTATIVE LOW- |
| | | | | AFFINITY INORGANIC |
| | | | | PHOSPHATE TRANSPORTER |
| | | | | (FRAGMENT) |
| 67 | 944 | 1075 | — | Similar to PTR2_YEAST |
| | | | | P32901 SACCHAROMYCES |
| | | | | CEREVISIAE (BAKER S |
| | | | | YEAST). PEPTIDE |
| | | | | TRANSPORTER PTR2 |
| | | | | (PEPTIDE PERMEASE PTR2). |

[0695] TABLE 7
Genes involved in rice grain filling, which belong to the functional category of carbohydrate metabolism
STARCH METABOLISM

| | | | | |
|---|---|---|---|---|
| Rice | Banana | Wheat | Maize | |
| (SEQ ID | (SEQ ID | (SEQ ID | (SEQ ID | |
| NO) | NO) | NO) | NO) | Gene Description |

Branching Enzyme

| | | | | |
|---|---|---|---|---|
| 69 | 888 | 1058 | — | Similar to GLGB_ORYSA Q01401 ORYZA SATIVA (RICE). |
| | | | | 1,4-ALPHA-GLUCAN BRANCHING ENZYME (EC 2.4.1.18) |
| | | | | (STARCH BRANCHINGENZYME) (Q-ENZYME). |
| 71 | — | 1026 | 1157 | Similar to gi\|4584507\|emb\|CAB40745.1\| |
| | | | | starch branching enzyme II [Solanum tuberosum] |
| 73 | — | 1018 | 1157 | gi\|3851526\|gb\|AAC72335.1\| |
| | | | | starch branching enzyme IIa [Hordeum vulgare |

Debranching Enzyme

| | | | | |
|---|---|---|---|---|
| 75 | — | 987 | — | gi\|1783306\|dbj\|BAA09167.1\| |
| | | | | starch debranching enzyme precursor [Oryza sativa] |
| 77 | — | 966 | — | Similar to gi\|3252794\|dbj\|BAA29041.1\| |
| | | | | isoamylase [Oryza sativa] |

Starch degradation Alpha - Amylases

| | | | | |
|---|---|---|---|---|
| 79 | 909 | 1083 | 1173 | Similar to AMYM_BACST P19531 BACILLUS |
| | | | | STEAROTHERMOPHILUS. MALTOGENIC |
| | | | | ALPHA-AMYLASE PRECURSOR (EC 3.2.1.133) |
| | | | | (GLUCAN 1,4-ALPHA-MALTOHYDROLASE) |
| 81 | 887 | 1035 | 1150 | Similar to gi\|426482\| Alpha-amylase |
| 83 | 887 | 1033 | 1150 | \|CAA39777.1\| Alpha- amylase |
| 85 | — | 1033 | 1150 | \|CAA39777.1\| Alpha- amylase |
| 87 | 887 | 1033 | 1151 | \|PF00128\| Alpha-amylase |
| 89; | 887 | 1032 | 1150 | gi\|426482\|aaa50161.1\| Alpha-amylase |
| 509 | | | | |
| 91 | — | 1034 | 1150 | gi\|113766\|sp\|P17654\|AMY1_ORYSA |
| | | | | ALPHA-AMYLASE PRECURSOR (1,4-ALPHA-D-GLUCAN |
| | | | | GLUCANOHYDROLASE) (ISOZYME 1B) |

alpha-Amylase Inhibitor

| | |
|---|---|
| 93 | |
| 95 | Motifs{Cereal_Tryp_Amyl_Inh Cereal trypsin/ |
| | alpha-amylase inhibitors family; |
| | Pfam6_1\|PF00234\|tryp_alpha_amyl Protease |
| | inhibitor/seed storage family} Evidence[100% (474/474)] |
| 97 | Motifs{Aldehyde_Dehydr_Cys Aldehyde |
| | dehydrogenases active sites; Cereal_Tryp_Amyl_Inh |
| | Cereal trypsin/alpha-amylase inhibitors family} |
| | Evidence[99% (486/489)] |
| 99 | Motifs{Cereal_Tryp_Amyl_Inh Cereal trypsin/ |
| | alpha-amylase inhibitors family; |
| | Pfam6_1\|PF00234\|tryp_alpha_amyl Protease |
| | inhibitor/seed storage family} Evidence[100% (501/501)] |

Beta-Amylase

| | | | | |
|---|---|---|---|---|
| 101 | — | 965 | 1107 | Similarity[y16242_1-1798 /codon_start = 2 |
| | | | | /db_xref = “gi: 4138596” /partial = true |
| | | | | /product = “beta-amylase” /protein_id = |
| | | | | “caa76131.1”] Evidence[100% (931/931)]. |
| 103 | 926 | 956 | 1156 | Similarity[z25871_48-1514 /codon_start = 1 |
| | | | | /db_xref = “swiss-prot:p55005” /ec_number = |
| | | | | “3.2.1.2” /product = “beta-amylase” |
| | | | | /protein_id = “caa81091.1”] |
| | | | | Evidence[100% (1539/1539)] |
| 105 | — | 955 | — | gi\|1703302\|sp\|P55005\|AMYB_MAIZE BETA- |
| | | | | AMYLASE (1,4-ALPHA-D-GLUCAN MALTOHYDROLASE) |
| 107 | — | 965 | 1106 | gi\|3334120\|sp\|P93594\|AMYB_WHEAT BETA- |
| | | | | AMYLASE (1,4-ALPHA-D-GLUCAN MALTOHYDROLASE) |

Pullulanase

| | | | | |
|---|---|---|---|---|
| 109 | — | 987 | — | Similarity[ab012915_2206-14924 /codon_start = 1 |
| | | | | /db_xref = “gi: 3172048” /product = “starch |
| | | | | debranching enzyme” /protein_id = “baa28632.1” |
| | | | | /note = “pullulanase”] Evidence[100% (3079/3079)] |
| | 887 | 1032 | 1150 | |

Glucosidase

| | | | | |
|---|---|---|---|---|
| 111 | — | 1005 | — | Similar to AMYG_NEUCR P14804 NEUROSPORA CRASSA. |
| | | | | GLUCOAMYLASE PRECURSOR (EC 3.2.1.3) (GLUCAN 1,4-ALPHA- |
| | | | | GLUCOSIDASE)-(1,4-ALPHA-D-GLUCAN GLUCOHYDROLASE). |
| 113 | 905 | 1021 | — | \|CAA04707.1\| Alpha-glucosidase |
| 115 | — | 1086 | 1144 | gi\|3023275\|sp\|Q43763\|AGLU_HORVU ALPHA- |
| | | | | GLUCOSIDASE PRECURSOR (MALTASE) |
| 117 | | | | gi\|544151\|sp\|Q99040\|DEXB_STRMU GLUCAN |
| | | | | 1,6-ALPHA-GLUCOSIDASE (DEXTRAN |
| | | | | GLUCOSIDASE) (EXO-1,6-ALPHA- |
| | | | | GLUCOSIDASE) (GLUCODEXTRANASE) |

Surose Synthase

| | | | | |
|---|---|---|---|---|
| 119 | 932 | 1006 | 1148 | Similar to SUS2_ARATH Q00917 ARABIDOPSIS |
| | | | | THALIANA (MOUSE-EAR CRESS). SUCROSE |
| | | | | SYNTHASE (EC 2.4.1.13) (SUCROSE-UDP |
| | | | | GLUCOSYLTRANSFERASE). |
| 121 | 930 | 1022 | 1170 | gi\|283009\|pir∥S22535 sucrose synthase |
| | | | | (EC 2.4.1.13) 1 - rice (fragment) |
| 123 | 930 | 1028 | 1170 | gi\|20366\|emb\|CAA46017.1\| sucrose synthase |
| | | | | [Oryza sativa] |
| 125 | 930 | 1054 | 1170 | gi\|267055\|sp\|Q00917\|SUS2_ARATH SUCROSE SYNTHASE |
| | | | | (SUCROSE-UDP GLUCOSYLTRANSFERASE) |
| 127 | 930 | 1054 | 1191 | gi\|66572\|pir∥YUMU sucrose synthase |
| | | | | (EC 2.4.1.13) - Arabidopsis thaliana |

Starch Synthase

| | | | | |
|---|---|---|---|---|
| 129 | — | 1066 | — | Similar to UGS3_SOLTU Q43847 SOLANUM |
| | | | | TUBEROSUM (POTATO). GLYCOGEN (STARCH) |
| | | | | SYNTHASE PRECURSOR (EC 2.4.1.11) (GBSSII) |
| | | | | (GRANULE-BOUND STARCH SYNTHASE II) (FRAGMENT) |
| 131 | 924 | 1070 | 1125 | Similar to gi\|3057122\|gb\|AAC14015.1\| starch |
| | | | | synthase DULL1 [Zea mays |
| 133 | 947 | 1055 | 1155 | Similar to gi\|5257102\|gb\|AAD41242.1\| granule |
| | | | | bound starch synthase [Oryza sativa subsp. japonica] |

ADPG pyrophosphorylase

| | | | | |
|---|---|---|---|---|
| 135 | — | 989 | 1193 | Similar to gi\|3093462\|gb\|AAC15247.1\| ADP-glucose |
| | | | | pyrophosphorylase large subunit [Oryza sativa] |
| 137 | 922 | 1098 | — | Similarity[ay028315_115-1617 /codon_start = 1 |
| | | | | /db_xref = “gi: 13508485” /product = “adp-glucose |
| | | | | pyrophosphorylase small subunit” /protein_id = |
| | | | | “aak27313.1” /note = “putative amyloplast form”] |
| | | | | Evidence[100% (1520/1520)] |
| 139 | — | 989 | 1193 | Similarity[ac007858_66917-70303 /codon_start = 1 |
| | | | | /db_xref = “gi: 5091608” /evidence = |
| | | | | “not_experimental” /gene = “10a19i.12” /protein_id = |
| | | | | “aad39597.1” /note = “identical to gb\|d50317 adp |
| | | | | glucose pyrophosphorylase large subunit from oryza sativa. |
| | | | | ests dbj\|d22125 and dbj\|d15718 come from”] |
| | | | | Evidence[100% (1615/1615)] Gene[10A19I.12 Identical to |
| | | | | gb\|D50317 ADP glucose pyrophosphorylase large subunit from |
| | | | | Oryza sativa. ESTs dbj\|D22125 and dbj\|D15718 come from] |
| 141 | 922 | 1098 | 1193 | Similar to gi\|169759\|gb\|AAA33890.1\| ADP- |
| | | | | glucose pyrophosphorylase 51 kD subunit |
| | | | | (EC 2.7.7.27) |

Triosephosphate Isomerase

| | | | | |
|---|---|---|---|---|
| 143 | 912 | 1046 | 1133 | Similarity[z32521_64-960 /codon_start = 1 |
| | | | | /db_xref = “swiss-prot: p46225” /ec_number = |
| | | | | “5.3.1.1” /product = “triosephosphate isomerase” |
| | | | | /protein_id = “caa83533.1”] Evidence[100% (822/822)] |
| 145 | 912 | 1046 | 1133 | db_xref = “swiss-prot: p46225” /ec_number = |
| | | | | “5.3.1.1” /product = “triosephosphate isomerase” |
| | | | | /protein_id = “caa83533.1”] Evidence[100% (822/822)] |
| 147 | 890 | 1003 | 1134 | Similarity[j04121_1-762 /codon_start = 1 /db_xref = |
| | | | | “gi: 556171” /product = “triosephosphate isomerase” |
| | | | | /protein_id = “aab62730.1”] Evidence[100% (683/683)] |

Other proteins involved in starch metabolism

| | | | | |
|---|---|---|---|---|
| 149 | 936 | 1043 | 1194 | Similarity[x53130_51-1127 /codon_start = 1 |
| | | | | /db_xref = “swiss-prot: p17784” /protein_id = |
| | | | | “caa37290.1” /note = “fructose-diphosphate aldolase |
| | | | | (aa 1-358)”] Evidence[100% (1078/1078)] |
| 151 | — | 963 | 1124 | \|AAA45939.1\|Alpha-1,4-glucan phosphorylase h isozyme |
| 153 | 950 | 959 | 1164 | Similarity[af020813_273-1436 /codon_start = 1 |
| | | | | /db_xref = “gi: 2997589” /function = “mediates |
| | | | | the antiport of glucose-6-phosphate against phosphate in plastids |
| | | | | of heterotrophic tissues” /gene = “gpt” /product = |
| | | | | “glucose-6-phosphate/phosphate-translocator precursor” |
| | | | | /protein_id = “aac08524.1” |
| 155; | 913 | — | 1154 | gi\|4539316\|emb\|CAB38817.1\| putative fructose- |
| 507 | | | | bisphosphate aldolase [Arabidopsis thaliana] |
| 157 | — | 1069 | — | Motifs{Pfam6_1\|PF00702\|Hydrolase haloacid |
| | | | | dehalogenase-like hydrolase} Evidence[82% (1032/1254)] |
| 159 | — | 1023 | — | Similarity[u17225_40-1743 /codon_start = 1 |
| | | | | /db_xref = “gi: 596023” /ec_number = “5.3.1.9” |
| | | | | /gene = “phil” /product = “glucose-6 phosphate |
| | | | | isomerase” /protein_id = “aaa82734.1” /note = |
| | | | | “phosphohexose isomerase”] Evidence[100% (1889/1889)] |
| | | | | Gene[phil 5.3.1.9 glucose-6 phosphate isomerase phosphohexose |
| | | | | isomerase] |
| 161 | 946 | 1103 | 1189 | Similarity[ab013353_89-1504 /codon_start = 1 |
| | | | | /db_xref = “gi: 3107931” /product = “udp-glucose |
| | | | | pyrophosphorylase” /protein_id = “baa25917.1”] |
| | | | | Evidence[100% (1582/1582)] |
| 163 | 937 | 970 | 1153 | Similarity[af372833_47-1273 /codon_start = 1 |
| | | | | /db_xref = “gi: 13991929” /product = “phos- |
| | | | | phoenolpyruvate/phosphate translocator” /protein_id = |
| | | | | “aak51561.1” /note = “ppt”] |
| | | | | Evidence[100% (1239/1239)] |
| 165 | 892 | 964 | 1179 | Similar to gi\|5231119\|gb\|AAD41079.1\|AF143202_1 |
| | | | | starch phosphorylase L [Solarium tuberosum]; |
| | | | | gi\|130172\|sp\|P27598\|PHSL_IPOBA ALPHA-1,4 |
| | | | | GLUCAN PHOSPHORYLASE, L ISOZYME, CHLOROPLAST |
| | | | | PRECURSOR (STARCH PHOSPHORYLASE L) |
| 167 | 902 | 997 | — | Motifs{Pfam6_1\|PF01591\|6PF2K 6-phosphofructo- |
| | | | | 2-kinase; Atp_Gtp_A ATP/GTP-binding site motif |
| | | | | A (P-loop)} Evidence[71% (2205/3069)] |
| 169 | 946 | 1050 | — | Similarity[ap001383_68171-73040 /codon_start = 1 |
| | | | | /db_xref = “gi: 7242911” /protein_id = |
| | | | | “baa92509.1” /note = “similar to udp-glucose |
| | | | | pyrophosphorylase. (x91347)”] Evidence[100% (1528/1528) |
| 171 | — | 1023 | — | Similarity[u17225_40-1743 /codon_start = 1 |
| | | | | /db_xref = “gi: 596023” /ec_number = “5.3.1.9” |
| | | | | /gene = “phil” /product = “glucose-6 phosphate |
| | | | | isomerase” /protein_id = “aaa82734.1” /note = |
| | | | | “phosphohexose isomerase”] Evidence[100% (1889/1889)] |
| | | | | Gene[phil 5.3.1.9 glucose-6 phosphate isomerase phosphohexose |
| | | | | isomerase] |
| 173 | — | 975 | — | Similarity[d45218_54-1760 /codon_start = 1 |
| | | | | /db_xref = “gi: 639686” /product = |
| | | | | “phosphoglucose isomerase (pgi-b)” /protein_id = |
| | | | | “baa08149.1”] Evidence[100% (1409/1409)] |
| 175 | 937 | 970 | 1153 | Similarity[af372833_47-1273 /codon_start = 1 |
| | | | | /db_xref = “gi: 13991929” /product = |
| | | | | “phosphoenolpyruvate/phosphate translocator” |
| | | | | /protein_id = “aak51561.1” /note = “ppt”] |
| | | | | Evidence[100% (1050/1050)] |
| 177 | 889 | 1081 | 1196 | Motifs{Pfam6_1\|PF00274\|glycolytic_enzy |
| | | | | Fructose-bisphosphate aldolase class-I; |
| | | | | Aldolase_Class_I Fructose-bisphosphate aldolase |
| | | | | class-I active site} Evidence[65% (1082/1650)] |
| 179 | — | 977 | 1180 | Similarity[z32850_352-4957 /codon_start = 1 |
| | | | | /db_xref = “swiss-prot: q41141” /product = |
| | | | | “pyrophosphate-dependent phosphofructokinase betasubunit” |
| | | | | /protein_id = “caa83683.1”] Evidence[100% (1698/1698)] |
| 181 | 892 | 964 | 1179 | Similarity[af095521_76-1923 /codon_start = 1 |
| | | | | /db_xref = “gi: 3790102” /ec_number = “2.7.1.90” |
| | | | | /gene = “ppi-pfka” /product = “pyrophosphate- |
| | | | | dependent phosphofructokinase alpha subunit” /protein_id = |
| | | | | “aac67587.1”] Evidence[100% (1939/1939)] |
| | | | | Gene[PPi-PFKa 2.7.1.90 pyrophosphate-dependent phosphofructo- |
| | | | | kinase alpha subunit] |
| 183 | 906 | 988 | 1113 | gi\|3122594\|sp\|Q59126\|PFP_AMYME |
| | | | | PYROPHOSPHATE--FRUCTOSE 6-PHOSPHATE |
| | | | | 1-PHOSPHOTRANSFERASE (6-PHOSPHOFRUCTOKINASE |
| | | | | (PYROPHOSPHATE)) (PYROPHOSPHATE-DEPENDENT 6- |
| | | | | PHOSPHOFRUCTOSE-1-KINASE) (PPI-PFK) |
| 185 | 896 | 1014 | 1180 | gi\|2499488\|sp\|Q41140\|PFPA_RICCO |
| | | | | PYROPHOSPHATE--FRUCTOSE 6-PHOSPHATE |
| | | | | 1-PHOSPHOTRANSFERASE ALPHA SUBUNIT |
| | | | | (PFP) (6-PHOSPHOFRUCTOKINASE (PYROPHOSPHATE)) |
| | | | | (PYROPHOSPHATE-DEPENDENT 6-PHOSPHOFRUCTOSE-1- |
| | | | | KINASE) (PPI-PFK) |
| 187; | 911 | — | 1138 | gi\|3913641\|sp\|O64422\|F16P_ORYSA |
| 511 | | | | FRUCTOSE-1,6-BISPHOSPHATASE, CHLOROPLAST PRECURSOR |
| | | | | (D-FRUCTOSE-1,6-BISPHOSPHATE 1-PHOSPHOHYDROLASE) (FBPASE) |

Non-Starch Carbohydrate Metabolism

| | | | | |
|---|---|---|---|---|
| 189 | 912 | 1046 | 1133 | Similarity[z3252l_64-960 /codon_start = 1 |
| | | | | /db_xref = “swiss-prot: p46225” /ec_number = |
| | | | | “5.3.1.1” /product = “triosephosphate isomerase” |
| | | | | /protein_id = “caa83533.1”] Evidence[100% (822/822)] |
| 191; | — | 1052 | 1121 | Similar to gi\|9294516\|dbj\|BAB02778.1\| contains |
| 503 | | | | similarity to endo-1,3-1,4-beta-D-glucanase˜gene_id: |
| | | | | MDB19.8 [Arabidopsis thaliana] |
| 193 | | | | Similar to PTSN_ECOLI P31222 ESCHERICHIA |
| | | | | COLI. NITROGEN REGULATORY IIA PROTEIN |
| | | | | (EC 2.7.1.69) (ENZYME IIA- |
| | | | | NTR)(PHOSPHOTRANSFERASE ENZYME II, A |
| | | | | COMPONENT); Motifs{Cytochrome_C Cytochrome |
| | | | | c family heme-binding site; Zinc_Finger_C2h2_1 |
| | | | | Zinc finger, C2H2 type, domain; Zinc_Finger_C2h2_1 |
| | | | | Zinc finger, C2H2 type, domain; Zinc_Finger_C2h2_1 |
| | | | | Zinc finger, C2H2 type, domain) Evidence[0% (0/2145)] |
| 195 | — | 1041 | 1137 | Similar to gi\|6714431\|gb\|AAF26119.1\|ACO12328_22 |
| | | | | putative cellulose synthase catalytic subunit |
| | | | | [Arabidopsis thaliana] |
| 197 | | | | Similar to gi\|22327\|emb\|CAA37998.1\| corn Hageman |
| | | | | factor inhibitor [Zea mays] |
| 199 | — | 1096 | — | gi\|728850\|sp\|P08640\|AMYH_YEAST |
| | | | | GLUCOAMYLASE S1/S2 PRECURSOR |
| | | | | (GLUCAN |
| 201 | | | | Elements[GC_box@16653 TATA_box@16019 |
| | | | | ATG@15968 PolyA@10370] Evidence[88% (2550/2886) |
| 203 | — | 1020 | 1140 | Similar to gi\|3850573\|gb\|AAC72113.1\| Similar to |
| | | | | gi\|1652733 glycogen operon protein GlgX from |
| | | | | Synechocystis sp. genome gb\|D90908.ESTs |
| | | | | gb\|H36690, gb\|AA712462, gb\|AA651230 and |
| | | | | gb\|N95932 come from this gene. [Arabidopsis thaliana] |
| 205 | 904 | 1095 | 1130 | Similar to gi\|5441877\|dbj\|BAA82375.1\| Similar |
| | | | | to glycogenin glucosyltransferase |
| | | | | (EC 2.4.1.186). (Z97341) [Oryza sativa] |
| 207 | 895 | 1076 | 1181 | Similar to gi\|8777412\|dbj\|BAA97002.1\|indole-3- |
| | | | | glycerol phosphate synthase [Arabidopsis thaliana] |
| 209 | — | 1101 | — | gi\|14156\|sp\|P13526\|ARLC_MAIZE |
| | | | | ANTHOCYANIN REGULATORY LC PROTEIN |

[0696] TABLE 8
Genes involved in rice grain filling, which belong
to the functional category of storage proteins

| Rice | Banana | Wheat | Maize | |
|---|---|---|---|---|
| (SEQ | (SEQ | (SEQ | (SEQ | |
| ID | ID | ID | ID | |
| NO) | NO) | NO) | NO) | Gene Description |
| 211 | | | | gi\|121099\|sp\| |
| | | | | P08079\|GDB0_WHEAT |
| | | | | GAMMA-GLIADIN PRECURSOR |
| 213 | — | 1044 | 1165 | Similar to GL19_ORYSA |
| | | | | P29835 ORYZA SATIVA |
| | | | | (RICE). 19 KD GLOBULIN |
| | | | | PRECURSOR (ALPHA- |
| | | | | GLOBULIN). |
| 215 | | | | Similar to |
| | | | | gi\|224389\|prf∥ |
| | | | | 1103218A glycinin A5 |
| | | | | [Glycine max] |
| 217 | | | | Similar to |
| | | | | gi\|296129\|emb\| |
| | | | | CAA46197.1\| prolamin |
| | | | | [Oryza sativa] |
| 219 | | | | Similar to |
| | | | | gi\|7209261\|emb\| |
| | | | | CAB76962.1\| alpha-gliadin |
| | | | | [Triticum aestivum] |
| | | | | Similar to |
| | | | | gi\|4126695\|dbj\| |
| | | | | BAA36699.1\| prolamin |
| | | | | [Oryza sativa] |
| 221 | | | | Similar to METC_RHILV |
| | | | | Q52811 RHIZOBIUM |
| | | | | LEGUMINOSARUM |
| | | | | (BIOVAR VICIAE). |
| | | | | PUTATIVE |
| | | | | CYSTATHIONINE |
| | | | | BETA-LYASE |
| | | | | (EC 4.4.1.8) (CBL) |
| | | | | (BETA-CYSTATHIONASE) |
| | | | | (CYSTEINE LYASE) |
| | | | | (ORF5) (FRAGMENT). |
| 223 | — | 960 | — | Similar to GU11_{—} |
| | | | | ORYSA P07728 |
| | | | | ORYZA SATIVA |
| | | | | (RICE). GLUTELIN |
| | | | | TYPE I PRECURSOR |
| | | | | (CLONE PREE 61). |
| 225 | — | 1068 | — | Similar to |
| | | | | gi\|226227\|prf∥ |
| | | | | 1502200A prolamin |
| | | | | [Avena sativa] |
| 227 | — | 1044 | 1165 | gi\|232161\|sp\| |
| | | | | P29835\|GL19_ORYSA 19 |
| | | | | KD GLOBULIN PRECURSOR |
| 229 | — | 960 | — | Similar to |
| | | | | gi\|169969\|gb\| |
| | | | | AAA33964.1\| |
| | | | | glycinin |
| 231 | 948 | 953 | 1176 | Similar to PRVA_RANCA |
| | | | | P18087 RANA CATESBEIANA |
| | | | | (BULL FROG). |
| | | | | PARVALBUMIN ALPHA |
| | | | | (PA 4.97). |
| 233 | — | 991 | — | gi\|121101\|sp\| |
| | | | | P08453\|GDB2_WHEAT |
| | | | | GAMMA-GLIADIN PRECURSOR |
| 235 | — | 960 | — | Similar to |
| | | | | gi\|20227\|emb\|CAA32566.1\| |
| | | | | preprolglutelin (AA −24 to 476) |
| | | | | [Oryza sativa] |
| 237 | — | 1073 | 1190 | Similar to PRVT_CHICK |
| | | | | P19753 GALLUS GALLUS |
| | | | | (CHICKEN). PARVALBUMIN, |
| | | | | THYMIC (AVIAN THYMIC |
| | | | | HORMONE) (ATH) (THYMUS- |
| | | | | SPECIFICANTIGEN T1). |
| 239 | | | | Similar to |
| | | | | gi\|20208\|emb\| |
| | | | | CAA38211.1\| glutelin |
| | | | | [Oryza sativa] |
| 241 | | | | Similar to |
| | | | | gi\|556407\|gb\| |
| | | | | AAA50319.1\| prolamin |
| 243 | | | | Similar to |
| | | | | gi\|166555\|gb\| |
| | | | | AAA32715.1\| avenin |
| 245 | — | 1048 | — | gi\|1170517\|sp\| |
| | | | | P45386\|IGA4_HAEIN |
| | | | | IMMUNOGLOBULIN A1 |
| | | | | PROTEASE PRECURSOR |
| 247 | | | | gi\|121090\|sp\| |
| | | | | P04721\|GDA1_WHEAT |
| | | | | ALPHA/BETA-GLIADIN A-I |
| | | | | PRECURSOR |
| 249 | | | | gi\|121101\|sp\| |
| | | | | P08453\|GDB2_WHEAT |
| | | | | GAMMA-GLIADIN |
| | | | | PRECURSOR |

[0697] TABLE 9
Genes involved in rice grain filling, which belong
to the functional category of Fatty Acid Metabolism

| Rice | Banana | Wheat | Maize | |
|---|---|---|---|---|
| (SEQ | (SEQ | (SEQ | (SEQ | |
| ID | ID | ID | ID | |
| NO) | NO) | NO) | NO) | Gene Description |
| 251 | 920 | 976 | 1131 | Similar to |
| | | | | PHLB_SERLI P18954 |
| | | | | SERRATIA |
| | | | | LIQUEFACIENS. PHLB |
| | | | | PROTEIN PRECURSOR. |
| 253 | — | 995 | — | Similar to LPXK_FRANO |
| | | | | Q47909 FRANCISELLA |
| | | | | NOVICIDA. PROBABLE |
| | | | | TETRAACYLDISACCHARIDE |
| | | | | 4 -KINASE (EC 2.7.1.130) |
| | | | | (LIPID A 4 -KINASE). |
| 255 | — | 972 | 1126 | Similar to |
| | | | | gi\|7339489\|emb\| |
| | | | | CAB82812.1\| phospho- |
| | | | | lipase-like protein |
| | | | | [Arabidopsis thaliana] |
| 257 | — | 1087 | 1177 | Similar to OLE2_ORYSA |
| | | | | Q40646 ORYZA SATIVA |
| | | | | (RICE). OLEOSIN 18 KD |
| | | | | (OSE721). Similar to |
| | | | | gi\|1171354\| |
| | | | | gb\|AAC02240.1\| |
| | | | | 18 kDa oleosin |
| | | | | [Oryza sativa] |
| 259 | — | 1100 | 1132 | Similar to |
| | | | | gi\|4455257\|emb\| |
| | | | | CAB36756.1\| |
| | | | | oleosin, 18.5 K |
| | | | | [Arabidopsis thaliana] |
| 261 | 910 | 1093 | 1158 | Similar to |
| | | | | KSU5_ECOLI P42216 |
| | | | | ESCHERICHIA COLI. |
| | | | | 3-DEOXY-MANNO- |
| | | | | OCTULOSONATE |
| | | | | CYTIDYLYLTRANS- |
| | | | | FERASE (EC 2.7.7.38) |
| | | | | (CMP-KDOSYNTHETASE) |
| | | | | (CMP-2-KETO-3- |
| | | | | DEOXYOCTULOSONIC |
| | | | | ACID SYNTHETASE) |
| | | | | (CKS). |
| 263 | 884 | 1038 | 1172 | Similar to |
| | | | | ACBP_GOSHI Q39779 |
| | | | | GOSSYPIUM HIRSUTUM |
| | | | | (UPLAND COTTON). |
| | | | | ACYL-COA-BINDING |
| | | | | PROTEIN (ACBP). |
| 265 | 915 | 990 | 1122 | Similar to |
| | | | | gi\|4587543\|gb\| |
| | | | | AAD25774.1\| |
| | | | | AC006577_10 Belongs |
| | | | | to the PF\|00657 |
| | | | | Lipase/Acylhydrolase |
| | | | | with GDSL-motif |
| | | | | family.EST |
| | | | | gb\|AB015099 comes |
| | | | | from this gene. |
| | | | | [Arabidopsis thaliana] |
| 267 | 897 | 1082 | 1195 | Similar to |
| | | | | GBSB_BACSU P71017 |
| | | | | BACILLUS SUBTILIS. |
| | | | | ALCOHOL DEHYDROGENASE |
| | | | | (EC 1.1.1.1). |
| 269 | — | 961 | — | Similar to |
| | | | | gi\|6714447\|gb\| |
| | | | | AAF26134.1\| |
| | | | | AC011620_10 putative |
| | | | | phospholipase D |
| | | | | [Arabidopsis thaliana] |
| 271 | — | 1100 | 1132 | Similar to |
| | | | | gi\|1171352\|gb\| |
| | | | | AAC02239.1\| 16 kDa |
| | | | | oleosin [Oryza |
| | | | | sativa] Similar to |
| | | | | gi\|944830\|emb\| |
| | | | | CAA43183.1\| soybean |
| | | | | 24 kDa oleosin isoform |
| | | | | [Glycine max] |
| 273 | 886 | 1012 | 1178 | Similar to |
| | | | | gi\|7576210\|emb\| |
| | | | | CAB87871.1\| palmitoyl- |
| | | | | protein thioesterase |
| | | | | precursor-like |
| | | | | [Arabidopsis thaliana] |
| 275 | | | | Similar to |
| | | | | 3O1D_COMTE Q06401 |
| | | | | COMAMONAS |
| | | | | TESTOSTERONI |
| | | | | (PSEUDOMONAS |
| | | | | TESTOSTERONI). |
| | | | | 3-OXOSTEROID 1- |
| | | | | DEHYDROGENASE |
| | | | | (EC 1.3.99.4). |
| 277 | — | 951 | 1160 | Similar to |
| | | | | CRTI_PHYBL P54982 |
| | | | | PHYCOMYCES |
| | | | | BLAKESLEEANUS. |
| | | | | PHYTOENE |
| | | | | DEHYDROGENASE |
| | | | | (EC 1.3.-.-) |
| | | | | (PHYTOENE DESATURASE). |
| 279 | — | 973 | — | Similar to |
| | | | | gi\|6648208\|gb\| |
| | | | | AAF21206.1\|AC013483_30 |
| | | | | putative phosphatidylinositol- |
| | | | | 4-phosphate 5-kinase |
| | | | | [Arabidopsis thaliana] |

[0698] TABLE 10
Genes involved in rice grain filling, which belong
to the functional category of amino acid metabolism

| Rice | Banana | Wheat | Maize | |
|---|---|---|---|---|
| (SEQ | (SEQ | (SEQ | (SEQ | |
| ID | ID | ID | ID | |
| NO) | NO) | NO) | NO) | Gene Description |
| 281 | — | 1053 | — | Similar to |
| | | | | gi\|2076884\|gb\| |
| | | | | AAB539751\| lysine- |
| | | | | ketoglutarate |
| | | | | reductase/saccharopine |
| | | | | dehydrogenase |
| | | | | [Arabidopsis thaliana] |
| 283 | — | 1036 | 1199 | Similar to |
| | | | | gi\|974605\|gb\| |
| | | | | AAA75104.1\| single- |
| | | | | stranded nucleic acid |
| | | | | binding protein |
| 285 | — | 978 | — | 68173.m01963#MAL21_29# |
| | | | | AT3g20250#RNA-binding |
| | | | | protein, putative- |
| | | | | Length = 955 |
| 287 | 918 | 1008 | 1139 | gi\|730108\|sp\| |
| | | | | Q00539\|NAM8_YEAST |
| | | | | NAM8 PROTEIN |
| 289 | 928 | 1061 | — | Similar to |
| | | | | gi\|287298\|dbj\| |
| | | | | BAA03504.1\| aspartate |
| | | | | aminotransferase |
| | | | | [Oryza sativa] |
| 291 | 923 | 980 | 1141 | Similar to MTAP_HUMAN |
| | | | | Q13126 HOMO SAPIENS |
| | | | | (HUMAN). 5-METHYLTHIO- |
| | | | | ADENOSINE PHOSPHORYLASE |
| | | | | (EC 2.4.2.28) |
| | | | | (MTAPHOSPHORYLASE) |
| | | | | (MTAPASE). |
| 293 | | | | Similar to SEPR_THESP |
| | | | | P80146 THERMUS SP. |
| | | | | (STRAIN RT41A). |
| | | | | EXTRACELLULAR SERINE |
| | | | | PROTEINASE PRECURSOR |
| | | | | (EC 3.4.21.-). |
| 295 | 903 | 1019 | — | Similar to |
| | | | | gi\|6728985\|gb\| |
| | | | | AAF26983.1\|AC018363_28 |
| | | | | putative |
| | | | | S-adenosylmethionine: |
| | | | | 2-demethylmenaquinone |
| | | | | methyltransferase |
| | | | | [A thaliana] |
| 297) | — | 1092 | — | 68173.m01963#MAL21_29# |
| | | | | AT3g20250#RNA-binding |
| | | | | protein, putative- |
| | | | | Length = 955 |
| 299 | — | 986 | 1169 | Similar to IF4H_HUMAN |
| | | | | Q15056 HOMO SAPIENS |
| | | | | (HUMAN). EUKARYOTIC |
| | | | | TRANSLATION INI- |
| | | | | TIATION FACTOR 4H |
| | | | | (EIF-4H) (KIAA0038). |

[0699] TABLE 11
Genes involved in rice grain filling, which belong
to the functional category of transcription factors

| Rice | Banana | Wheat | Maize | |
|---|---|---|---|---|
| (SEQ | (SEQ | (SEQ | (SEQ | |
| ID | ID | ID | ID | |
| NO) | NO) | NO) | NO) | Gene Description |
| 301 | | | | Similar to |
| | | | | gi\|7211973\|gb\| |
| | | | | AAF40444.1\| |
| | | | | AC004809_2 Contains |
| | | | | similarity to the |
| | | | | CREB-binding protein |
| | | | | (CBP) from Mus sp |
| | | | | gb\|S66385. |
| | | | | [Arabidopsis thaliana] |
| 303 | — | 974 | — | Similar to |
| | | | | gi\|6899934\|emb\| |
| | | | | CAB71884.1\| |
| | | | | putative zinc-finger |
| | | | | protein [A thaliana] |
| 305 | | | | gi\|2493550\|sp\| |
| | | | | Q02516\|HAP5_YEAST |
| | | | | TRANSCRIPTIONAL |
| | | | | ACTIVATOR HAP5 |
| 307 | 898 | 1091 | 1201 | Similar to |
| | | | | gi\|403418\|gb\| |
| | | | | AAA18414.1\| GBF4 |
| 309 | | | | 68170.m04237#F14G24_15# |
| | | | | At1g52880#NAM-like |
| | | | | proteinLength = 320 |
| 311 | 933 | 996 | 1129 | Myb family transcription |
| | | | | factor |
| 313 | | | | Myb family transcription |
| | | | | factor |
| 315 | 943 | 1072 | 1119 | Myb family transcription |
| | | | | factor |
| 317 | — | 1007 | — | Myb family transcription |
| | | | | factor |
| 319 | — | 1013 | 1143 | Similarity[af007269_37269- |
| | | | | 38693 /gene = “a_ig002n01.20” |
| | | | | /protein_id = “aab61027.1” |
| | | | | /note = “contains weak |
| | | | | similarity to myb-related |
| | | | | proteins” ] Evidence[100% |
| | | | | (559/559)] |
| 321 | — | 1097 | 1135 | Motifs{Myb_2 Myb |
| | | | | DNA-binding domain repeat; |
| | | | | Myb_2 Myb DNA-binding |
| | | | | domain repeat} |
| | | | | Evidence[38% (306/804)] |
| 323 | 940 | 981 | 1197 | Similar to |
| | | | | gi\|2894607\|emb\| |
| | | | | CAA17141.1\| NAM (no |
| | | | | apical meristem)-like |
| | | | | protein [Arabidopsis |
| | | | | thaliana] |
| 325 | — | — | 1171 | Similar to |
| | | | | gi\|2224929\|gb\| |
| | | | | AAC49747.1\| ethylene- |
| | | | | insensitive3-like2 |
| | | | | [Arabidopsis thaliana] |
| 327 | — | 979 | 1174 | Myb DNA-binding domain |
| | | | | repeat; Myb_2 Myb DNA- |
| | | | | binding domain repeat; |
| | | | | Myb_2 Myb DNA-binding |
| | | | | domain repeat} |
| | | | | Evidence[69% (615/879)] |

### Example 5

### Rice Orthologs of Arabidopsis Grain Filling Genes Identified by Reverse Genetics

[0700] Understanding the function of every gene is the major challenge in the age of completely sequenced eukaryotic genomes. Sequence homology can be helpful in identifying possible functions of many genes. However, reverse genetics, the process of identifying the function of a gene by obtaining and studying the phenotype of an individual containing a mutation in that gene, is another approach to identify the function of a gene.

[0701] Reverse genetics in Arabidopsis has been aided by the establishment of large publicly available collections of insertion mutants (Krysan et al., (1999) Plant Cell 11, 2283-2290; Tisser et al., (1999) Plant Cell 11, 1841-1852; Speulman et al., (1999). Plant Cell 11, 1853-1866; Parinov et al., (1999). Plant Cell 11, 2263-2270; Parinov and Sundaresan, 2000; Biotechnology 11, 157-161). Mutations in genes of interest are identified by screening the population by PCR amplification using primers derived from sequences near the insert border and the gene of interest to screen through large pools of individuals. Pools producing PCR products are confirmed by Southern hybridization and further deconvoluted into subpools until the individual is identified (Sussmnan et al., (2000) Plant Physiology 124, 1465-1467).

[0702] Recently, some groups have begun the process of sequencing insertion site flanking regions from individual plants in large insertion mutant populations, in effect prescreening a subset of lines for genomic insertion sites (Parinov et al., (1999). Plant Cell 11, 2263-2270; Tisser et al., (1999). Plant Cell 11, 1841-1852). The advantage to this approach is that the laborious and time-consuming process of PCR-based screening and deconvolution of pools is avoided.

[0703] A large database of insertion site flanking sequences from approximately 100,000 T-DNA mutagenized Arabidopsis plants of the Columbia ecotype (GARLIC lines) is prepared. T-DNA left border sequences from individual plants are amplified using a modified thermal asymmetric interlaced-polymerase chain reaction (TAIL-PCR) protocol (Liuet al., (1995). Plant J. 8, 457-463). Left border TAIL-PCR products are sequenced and assembled into a database that associates sequence tags with each of the approximately 100,000 plants in the mutant collection. Screening the collection for insertions in genes of interest involves a simple gene name or sequence BLAST query of the insertion site flanking sequence database, and search results point to individual lines. Insertions are confirmed using PCR.

[0704] Analysis of the GARLIC insert lines suggests that there are 76,856 insertions that localize to a subset of the genome representing coding regions and promoters of 22,880 genes. Of these, 49,231 insertions lie in the promoters of over 18,572 genes, and an additional 27,625 insertions are located within the coding regions of 13,612 genes. Approximately 25,000 T-DNA left border mTAIL-PCR products (25% of the total 102,765) do not have significant matches to the subset of the genome representing promoters and coding regions, and are therefore presumed to lie in noncoding and/or repetitive regions of the genome.

[0705] The Arabidopsis T-DNA GARLIC insertion collection is used to investigate the roles of certain genes in the grain filling process. Target genes are chosen using a variety of criteria, including public reports of mutant phenotypes, RNA profiling experiments, and sequence similarity to genes implicated in grain filling. Plant lines with insertions in genes of interest are then identified. Each T-DNA insertion line is represented by a seed lot collected from a plant that is hemizygous for a particular T-DNA insertion. Plants homozygous for insertions of interest are identified using a PCR assay. The seed produced by these plants is homozygous for the T-DNA insertion mutation of interest.

[0706] Homozygous mutant plants are tested for altered grain composition. The genes interrupted in these mutants contribute to the observed phenotype. The genes interrupted in these mutants interfere with the normal grain filling process.

[0707] Rice orthologs of the Arabidopsis genes affecting the grain filling process and thus grain composition are identified by similarity searching of a rice database using the Double-Affine Smith-Waterman algorithm (BLASP with e values better than ⁻¹⁰).

### Example 6

### Cloning and Sequencing of Nucleic Acid Molecules from Rice

[0708] 6.1 Genomic DNA:

[0709] Plant genomic DNA samples are isolated from a collection of tissues which are listed in Table 1. Individual tissues are collected from a minimum of five plants and pooled. DNA can be isolated according to one of the three procedures, e.g., standard procedures described by Ausubel et al. (1995), a quick leaf prep described by Klimyuk et al. (1993), or using FTA paper (Life Technologies).

[0710] For the latter procedure, a piece of plant tissue such as, for example, leaf tissue is excised from the plant, placed on top of the FTA paper and covered with a small piece of parafilm that serves as a barrier material to prevent contamination of the crushing device. In order to drive the sap and cells from the plant tissue into the FTA paper matrix for effective cell lysis and nucleic acid entrapment, a crushing device is used to mash the tissue into the FTA paper. The FTA paper is air dried for an hour. For analysis of DNA, the samples can be archived on the paper until analysis. Two mm punches are removed from the specimen area on the FTA paper using a 2 mm Harris Micro Punch™ and placed into PCR tubes. Two hundred (200) microliters of FTA purification reagent is added to the tube containing the punch and vortexed at low speed for 2 seconds. The tube is then incubated at room temperature for 5 minutes. The solution is removed with a pipette so as to repeat the wash one more time. Two hundred (200) microliters of TE (10 mM Tris, 0.1 mM EDTA, pH 8.0) is added and the wash is repeated two more times. The PCR mix is added directly to the punch for subsequent PCR reactions.

[0711] 6.2 Cloning of Candidate cDNA: A candidate cDNA is amplified from total RNA isolated from rice tissue after reverse transcription using primers designed against the computationally predicted cDNA. Primers designed based on the genomic sequence can be used to PCR amplify the full length cDNA (start to stop codon) from first strand cDNA prepared from rice cultivar Nipponbare tissue.

[0712] The Qiagen RNeasy kit (Qiagen, Hilden, Germany) is used for extraction of total RNA. The Superscript II kit (Onvitrogen, Carlsbad, USA) is used for the reverse transcription reaction. PCR amplification of the candidate cDNA is carried out using the reverse primer sequence located at the translation start of the candidate gene in 5′-3′ direction. This is performed with high-fidelity Taq polymerase (Invitrogen, Carlsbad, USA).

[0713] The PCR fragment is then cloned into pCR2.1-TOPO (Invitrogen) or the pGEM-T easy vector (Promega Corporation, Madison, Wis., USA) per the manufacturer's instructions, and several individual clones are subjected to sequencing analysis.

[0714] 6.3 DNA sequencing: DNA preps for 2-4 independent clones are miniprepped following the manufacturer's instructions (Qiagen). DNA is subjected to sequencing analysis using the BigDye™ Terminator Kit according to manufacturer's instructions (AB). Sequencing makes use of primers designed to both strands of the predicted gene of interest. DNA sequencing is performed using standard dye-terminator sequencing procedures and automated sequencers (models 373 and 377; Applied Biosystems, Foster City, Calif.). All sequencing data are analyzed and assembled using the Phred/Phrap/Consed software package (University of Washington) to an error ratio equal to or less than 10⁻⁴ at the consensus sequence level.

[0715] The consensus sequence from the sequencing analysis is then to be validated as being intact and the correct gene in several ways. The coding region is checked for being full length (predicted start and stop codons present) and uninterrupted (no internal stop codons). Alignment with the gene prediction and BLAST analysis is used to ascertain that this is in fact the right gene.

[0716] The clones are sequenced to verify their correct amplification.

### Example 7

### Functional Analysis in Plants

[0717] A plant complementation assay can be used for the functional characterization of the grain filing genes according to the invention.

[0718] Rice and Arabidopsis putative orthologue pairs are identified using BLAST comparisons, TFASTXY comparisons, and Double-Affine Smith-Waterman similarity searches. Constructs containing a rice cDNA or genomic clone inserted between the promoter and terminator of the Arabidopsis orthologue are generated using overlap PCR (Gene 77, 61-68 (1989)) and GATEWAY cloning (Life Technologies Invitrogen). For ease of cloning, rice cDNA clones are preferred to rice genomic clones. A three stage PCR strategy is used to make these constructs.

[0719] (1) In the first stage, primers are used to PCR amplify: (i) 2 Kb upstream of the translation start site of the Arabidopsis orthologue, (ii) the coding region or cDNA of the rice orthologue, and (iii) the 500 bp immediately downstream of the Arabidopsis orthogue's translation stop site. Primers are designed to incorporate onto their 5′ ends at least 16 bases of the 3′ end of the adjacent fragment, except in the case of the most distal primers which flank the gene construct (the forward primer of the promoter and the reverse primer of the terminator). The forward primer of the promoters contains on their 5′ ends partial AttB1 sites, and the reverse primer of the terminators contains on their 5′ ends partial AttB2 sites, for Gateway cloning.

[0720] (2) In the second stage, overlap PCR is used to join either the promoter and the coding region, or the coding region and the terminator.

[0721] (3) In the third stage either the promoter-coding region product can be joined to the terminator or the coding regionterminator product can be joined to the promoter, using overlap PCR and amplification with full Att site-containing primers, to link all three fragments, and put full Att sites at the construct termini.

[0722] The fused three-fragment piece flanked by Gateway cloning sites are introduced into the LTI donor vector pDONR201 (Invitrogen) using the BP clonase reaction, for confirmation by sequencing. Confirmed sequenced constructs are introduced into a binary vector containing Gateway cloning sites, using the LR clonase reaction such as, for example, pAS200.

[0723] The pAS200 vector was created by inserting the Gateway cloning cassette RfA into the Acc651 site of pNOV3510.

[0724] pNOV3510 was created by ligation of inverted pNOV2114 VSI binary into pNOV3507, a vector containing a PTX5′ Arab Protox promoter driving the PPO gene with the Nos terminator.

[0725] pNOV2114 was created by insertion of virN54D (Pazour et al. 1992, J. Bacteriol. 174:4169-4174) from pAD1289 (Hansen et al. 1994, PNAS 91:7603-7607) into pHiNK085.

[0726] pHiNK085 was created by deleting the 35S:PMI cassette and M13 ori in pVictor HiNK.

[0727] pPVictor HiNK was created by modifying the T-DNA of pVictor (described in WO 97/04112) to delete M13 derived sequences and to improve its cloning versatility by introducing the BIGLINK polylinker.

[0728] The sequence of the pVictor HiNK vector is disclosed in SEQ ID NO: 5 in WO 00/6837, which is incorporated herein by reference. The pVictor HiNK vector contains the following constituents that are of functional importance:
[0729] The origin of replication (OR1) functional in Agrobacterium is derived from the Pseudomonas aeruginosa plasmid pVS1 (Itoh et al. 1984. Plasmid 11: 206-220; Itoh and Haas, 1985. Gene 36: 27-36). The pVS1 OR1 is only functional in Agrobacterium and can be mobilised by the helper plasmid pRK2013 from E. coli into A. tumefaciens by means of a triparental mating procedure (Ditta et al., 1980. Proc. Natl. Acad. Sci USA 77: 7347-7351).
[0730] The ColE1 origin of replication functional in E. coli is derived from pUC19 (Yannisch Perron et al., 1985. Gene 33: 103-119).
[0731] The bacterial resistance to spectinomycin and streptomycin encoded by a 0.93 kb fragment from transposon Tn7 (Fling et al., 1985. Nucl. Acids Res. 13: 7095) functions as selectable marker for maintenance of the vector in E. coli and Agrobacterium. The gene is fused to the tac promoter for efficient bacterial expression (Amman et al., 1983. Gene 25: 167-178).
[0732] The right and left T-DNA border fragments of 1.9 kb and 0.9 kb that comprise the 24 bp border repeats, have been derived from the Ti-plasmid of the nopaline type Agrobacterium tumefaciens strains pTiT37 (Yadav et al., 1982. Proc. Natl. Acad. Sci. USA. 79: 6322-6326).

[0733] The plasmid is introduced into Agrobacterium tumefaciens GV3101 pMP90 by electroporation. The positive bacterial transformants are selected on LB medium containing 50 μg/μl kanamycin and 25 μg/μd gentamycin. Plants are transformed by standard methodology (e.g., by dipping flowers into a solution containing the Agrobacterium) except that 0.02% Silwet—77 (Lehle Seeds, Round Rock, Tex.) is added to the bacterial suspension and the vacuum step omitted. Five hundred (500) mg of seeds are planted per 2 ft² flat of soil and, and progeny seeds are selected for transformants using PPO selection.

[0734] Primary transformants are analyzed for complementation. Primary transformants are genotyped for the Arabidopsis mutation and presence of the transgene. When possible, >50 mutants harboring the transgene should be phenotyped to observe variation due to transgene copy number and expression

### Example 8

### Vector Construction for Overexpression and Gene “Knockout” Experiments

[0735] 8.1 Overexpression

[0736] Vectors used for expression of full-length “grain filling candidate genes” of interest in plants (overexpression) are designed to overexpress the protein of interest and are of two general types, biolistic and binary, depending on the plant transformation method to be used.

[0737] For biolistic transformation (biolistic vectors), the requirements are as follows:
[0738] 1. a backbone with a bacterial selectable marker (typically, an antibiotic resistance gene) and origin of replication functional in Escherichia coli (E. coli; eg. ColE1), and
[0739] 2. a plant-specific portion consisting of
   [0740] a. a gene expression cassette consisting of a promoter (eg. ZmUBlint MOD), the gene of interest (typically, a full-length cDNA) and a transcriptional terminator (eg. Agrobacterium tumefaciens nos terminator);
   [0741] b. a plant selectable marker cassette, consisting of a promoter (eg. rice Act1D-BV MOD), selectable marker gene (eg. phosphomannose isomerase, PMI) and transcriptional terminator (eg. CaMV terminator).
      Vectors designed for transformation by Agrobacterium tumefaciens (A. tumefaciens; binary vectors) consist of:
[0742] 1. a backbone with a bacterial selectable marker functional in both E. coli and A. tumefaciens (eg. spectinomycin resistance mediated by the aadA gene) and two origins of replication, functional in each of aforementioned bacterial hosts, plus the A. tumefaciens virG gene;
[0743] 2. a plant-specific portion as described for biolistic vectors above, except in this instance this portion is flanked by A. tumefaciens right and left border sequences which mediate transfer of the DNA flanked by these two sequences to the plant.

[0744] 8.2 Knockout Vectors

[0745] Vectors designed for reducing or abolishing expression of a single gene or of a family or related genes (knockout vectors) are also of two general types corresponding to the methodology used to downregulate gene expression: antisense or double-stranded RNA interference (dsRNAi).

(a) Anti-Sense

[0746] For antisense vectors, a full-length or partial gene fragment (typically, a portion of the cDNA) can be used in the same vectors described for full-length expression, as part of the gene expression cassette. For antisense-mediated down-regulation of gene expression, the coding region of the gene or gene fragment will be in the opposite orientation relative to the promoter, thus, mRNA will be made from the non-coding (antisense) strand in planta.

[0747] (b) dsRNAi

[0748] For dsRNAi vectors, a partial gene fragment (typically, 300 to 500 basepairs long) is used in the gene expression cassette, and is expressed in both the sense and antisense orientations, separated by a spacer region (typically, a plant intron, eg. the OsSH1 intron 1, or a selectable marker, eg. conferring kanamycin resistance). Vectors of this type are designed to form a double-stranded mRNA stem, resulting from the basepairing of the two complementary gene fragments in planta.

[0749] Biolistic or binary vectors designed for overexpression or knockout can vary in a number of different ways, including eg. the selectable markers used in plant and bacteria, the transcriptional terminators used in the gene expression and plant selectable marker cassettes, and the methodologies used for cloning in gene or gene fragments of interest (typically, conventional restriction enzyme-mediated or Gateway™ recombinase-based cloning). An important variant is the nature of the gene expression cassette promoter driving expression of the gene or gene fragment of interest in most tissues of the plants (constitutive, eg. ZmUBlint MOD), in specific plant tissues (eg. maize ADP-gpp for endosperm-specific expression), or in an inducible fashion (eg. GAL4bsBzl for estradiol-inducible expression in lines constitutively expressing the cognate transcriptional activator for this promoter).

### Example 9

### Insertion of a “Grain Filling Candidate Gene” 1 into Expression Vector

[0750] A validated rice cDNA clone in pCR2.1-TOPO or the pGEM-T easy vector is subcloned using conventional restriction enzyme-based cloning into a vector, downstream of the maize ubiquitin promoter and intron, and upstream of the Agrobacterium tumefaciens nos 3′ end transcriptional terminator. The resultant gene expression cassette (promoter, “grain filling candidate gene” and terminator) is further subcloned, using conventional restriction enzyme-based cloning, into the pNOV2117 binary vector (Negrotto et al (2000) Plant Cell Reports 19, 798-803; plasmid pNOV117 discosed in this article corresponds to pNOV2117 described herein; the nucleotide sequence of pNOV2117 is provided in SEQ ID NO: 44 of WO 0173087), generating pNOVCAND.

[0751] The pNOVCAND binary vector is designed for transformation and over-expression of the “grain filling candidate gene” in monocots. It consists of a binary backbone containing the sequences necessary for selection and growth in Escherichia coli DH-5α (Invitrogen) and Agrobacterium tumefaciens LBA4404 (pAL4404; pSB1), including the bacterial spectinomycin antibiotic resistance aadA gene from E. coli transposon Tn7, origins of replication for E. coli (ColE1) and A. tumefaciens (VS1), and the A. tumefaciens virG gene. In addition to the binary backbone, which is identical to that of pNOV2114 described herein previously (see Example 7 above), pNOV2117 contains the T-DNA portion flanked by the right and left border sequences, and including the Positech™ (Syngenta) plant selectable marker (WO 94/20627) and the “grain filling candidate gene” gene expression cassette. The Positech™ plant selectable marker confers resistance to mannose and in this instance consists of the maize ubiquitin promoter driving expression of the PMI (phosphomannose isomerase) gene, followed by the cauliflower mosaic virus transcriptional terminator.

[0752] Plasmid pNOV2117 is introduced into Agrobacterium tumefaciens LBA4404 (pAL4404; pSB1) by electroporation. Plasmid pAL4404 is a disarmed helper plasmid (Ooms et al (1982) Plasmid 7, 15-29). Plasmid pSB1 is a plasmid with a wide host range that contains a region of homology to pNOV2117 and a 15.2 kb KpnI fragment from the virulence region of pTiBo542 (Ishida et al (1996) Nat Biotechnol 14, 745-750). Introduction of plasmid pNOV2117 into Agrobacterium strain LBA4404 results in a co-integration of pNOV2117 and pSB1.

[0753] Alternatively, plasmid pCIB7613, which contains the hygromycin phosphotransferase (hpt) gene (Gritz and Davies, Gene 25, 179-188, 1983) as a selectable marker, may be employed for transformation.

[0754] Plasmid pCIB7613 (see WO 98/06860, incorporated herein by reference in its entirety) is selected for rice transformation. In pCIB7613, the transcription of the nucleic acid sequence coding hygromycin-phosphotransferase (HYG genc) is driven by the corn ubiquitin promoter (ZmUbi) and enhanced by corn ubiquitin intron 1. The 3′polyadenylation signal is provided by NOS 3′ nontranslated region.

[0755] Other useful plasmids include pNADII002 (GALA-ER-VP16) which contains the yeast GAL4 DNA Binding domain (Keegan et al., Science, 231:699 (1986)), the mammalian estrogen receptor ligand binding domain (Greene et al., Science, 231 :1150 (1986)) and the transcriptional activation domain of the HSV VP16 protein (Triezenberg et al., 1988). Both hpt and GAIA-ER-VP16 are constitutively expressed using the maize Ubiquitin promoter, and pSGCDL1 (GAL4BS Bzl Luciferase), which carries the firefly luciferase reporter gene under control of a minimal maize Bronzel (Bzl) promoter with 10 upstream synthetic GAL4 binding sites. All constructs use termination signals from the nopaline synthase gene.

### Example 10

### Plant Transformation

[0756] 10.1 Rice Transformation

[0757] pNOVCAND is transformed into a rice cultivar (Kaybonnet) using Agrobacterium-mediated transformation, and mannose-resistant calli are selected and regenerated.

[0758] Agrobacterium is grown on YPC solid plates for 2-3 days prior to experiment initiation. Agrobacterial colonies are suspended in liquid MS media to an OD of 0.2 at λ600 nm. Acetosyringone is added to the agrobacterial suspension to a concentration of 200 μM and agro is induced for 30 min.

[0759] Three-week-old calli which are induced from the scutellum of mature seeds in the N6 medium (Chu, C. C. et al., Sci, Sin., 18, 659-668(1975)) are incubated in the agrobacterium solution in a 100×25 petri plate for 30 minutes with occasional shaking. The solution is then removed with a pipet and the callus transfered to a MSAs medium which is overlayed with sterile filter paper.

[0760] Co-Cultivation is continued for 2 days in the dark at 22° C.

[0761] Calli are then placed on MS-Timetin plates for 1 week. After that they are tranferred to PAA+ mannose selection media for 3 weeks.

[0762] Growing calli (putative events) are picked and transfered to PAA+ mannose media and cultivated for 2 weeks in light.

[0763] Colonies are tranferred to MS20SorbKinTim regeneration media in plates for 2 weeks in light. Small plantlets are transferred to MS20SorbKinTim regeneration media in GA7 containers. When they reach the lid, they are transfered to soil in the greenhouse.

[0764] Expression of the “grain filling candidate gene” in transgenic To plants is analyzed. Additional rice cultivars, such as but not limited to, Nipponbare, Taipei 309 and Fuzisaka 2 are also transformed and assayed for expression of the “grain filling candidate gene” product and enhanced protein expression.

[0765] 10.2 Maize Transformation

[0766] Transformation of immature maize embryos is performed essentially as described in Negrotto et al., (2000) Plant Cell Reports 19: 798-803. For this example, all media constituents are as described in Negrotto et al., supra. However, various media constituents described in the literature may be substituted.

1. Transformation Plasmids and Selectable Marker

[0767] The genes used for transformation are cloned into a vector suitable for maize transformation as described in Example 17. Vectors used contain the phosphomannose isomerase (PMI) gene (Negrotto et al. (2000) Plant Cell Reports 19: 798-803).

2. Preparation of Agrobacterium tumefaciens

[0768] Agrobacterium strain LBA4404 (pSB1) containing the plant transformation plasmid is grown on YEP (yeast extract (5 g/L), peptone (10 g/L), NaCl (5 g/L), 15 g/l agar, pH 6.8) solid medium for 2 to 4 days at 28° C. Approximately 0.8×10⁹ Agrobacteria are suspended in LS-inf media supplemented with 100 μM acetosyringone (As) (Negrotto et al.,(2000) Plant Cell Rep 19: 798-803). Bacteria are pre-induced in this medium for 30-60 minutes.

3. Inoculation

[0769] Immature embryos from A188 or other suitable maize genotypes are excised from 8-12 day old ears into liquid LS-inf+100 μM As. Embryos are rinsed once with fresh infection medium. Agrobacterium solution is then added and embryos are vortexed for 30 seconds and allowed to settle with the bacteria for 5 minutes. The embryos are then transferred scutellum side up to LSAs medium and cultured in the dark for two to three days. Subsequently, between 20 and 25 embryos per petri plate are transferred to LSDc medium supplemented with cefotaxime (250 mg/l) and silver nitrate (1.6 mg/l) and cultured in the dark for 28° C. for 10 days.

4. Selection of Transformed Cells and Regeneration of Transformed Plants

[0770] Immature embryos producing embryogenic callus are transferred to LSDIM0.5S medium. The cultures are selected on this medium for 6 weeks with a subculture step at 3 weeks. Surviving calli are transferred either to LSDIM0.5S medium to be bulked-up or to Reg1 medium. Following culturing in the light (16 hour light/8 hour dark regiment), green tissues are then transferred to Reg2 medium without growth regulators and incubated for 1-2 weeks. Plantlets are transferred to Magenta GA-7 boxes (Magenta Corp, Chicago Ill.) containing Reg3 medium and grown in the light. Plants that are PCR positive for the promoter-reporter cassette are transferred to soil and grown in the greenhouse.

### Example 11

### Promoter Analysis

[0771] The gene chip experiment described above in Examples 3 and 4 are designed to uncover genes that are expressed in seed tissue during grain filling. Candidate promoters are identified based upon the expression profiles of the associated transcripts representatives of which are provided in SEQ ID NOs: 643-883.

[0772] Candidate promoters are obtained by PCR and fused to a GUS reporter gene containing an intron. Both histocherical and fluometric GUS assays are carried out on stably transformed rice and maize plants and GUS activity is detected in the transformants.

[0773] Further, transient assays with the promoter:GUS constructs are carried out in rice embryogenic callus and GUS activity is detected by histochemical staining according the protocol described below (see Example 12).

Construction of Binary Promoter::Reporter Plasmids

[0774] To construct a binary promoter: reporter plasmid for rice transformation a vector containing a promoter of interest (i.e., the DNA sequence 5′ of the initiation codon for the gene of interest) is used, which results from recombination in a BP reaction between a PCR product using the promoter of interest as a template and pDONR201™, producing an entry vector. The regulatory/promoter sequence is fused to the GUS reporter gene (Jefferson et al, 1987) by recombination using GATEWAY™ Technology according to manufacturers protocol as described in the Instruction Manual (GATEWAY™ Cloning Technology, GIBCO BRL, Rockville, Md. http://www.lifetech.com/).

[0775] Briefly, the Gateway Gus-intronGus (GIG)/NOS expression cassette is ligated into pNOV2117 binary vector in 5′ to 3′ orientation. The 4.1 kB expression cassette is ligated into the Kpn-1 site of pNOV2117, then clones are screened for orientation to obtain pNOV2346, a GATEWAY™ adapted binary destination vector.

[0776] The promoter fragment in the entry vector is recombined via the LR reaction with the binary destination vector containing the GUS coding region with an intron that has an attR site 5′ to the GUS reporter, producing a binary vector with a promoter fused to the GUS reporter (pNOVCANDProm). The orientation of the inserted fragment is maintained by the alt sequences and the final construct is verified by sequencing. The construct is then transformed into Agrobacterium tumefaciens strains by electroporation as described herein previously (see Example 9).

### Example 12

### Transient Expression Analysis of Candidate Promoters in Rice Embryogenic Callus

Materials:

[0777] Embryopenic rice callus (Kaybonett cultivar)
[0778] LBA 4404 Agrobacterium strains
[0779] KCMS liquid media for re-suspending bacterial pellet
[0780] 200 mM stock (40 mg/ml) Acetosyringone
[0781] Sterile filter paper discs (8.5 mm in diameter)
[0782] LB spec liquid culture
[0783] MS-CIM media plates
[0784] MS-AS plates (co-cultivation plates)
[0785] MS-Tim plates (recovery plates)
[0786] Gus staining solution
   Methods:
   Induction of Embryogenic Callus:
[0787] 1. Sterilize mature Kayboneu rice seeds in 40% ultra Clorox, 1 drop Tween 20, for 40 min.
[0788] 2. Rinse with sterile water and plate on MS-CIM media (12 seeds/plate)
[0789] 3. Grow in dark for four weeks.
[0790] 4. Isolate embryogenic calli from scutellum to MS-CIM
[0791] 5. Let grow in dark 8 days before use for transformation
   Agrobacterium Preparation and Induction:
[0792] 1. Start 6 mL shaking cultures of LBA4404 Agrobacterium strains harboring rice promoter binary plasmids.
[0793] 2. Grow the cultures at room temperature for 48 hrs in the rotary shaker.
[0794] 3. Spin down the cultures at 8,000 rpm at 4° C. and re-suspend bacterial pellets in 10 ml of KCMS media supplemented with 100?M Acetosyringone.
[0795] 4. Place in the shaker at room temp for 1 hr for induction of Agrobacterium virulence ones.
[0796] 5. In a sterile hood dilute Agrobacterium cultures 1:3 in KSMS media and transfer diluted cultures into deep petri dishes.
   Inoculation of Plant Material and Staining:
[0797] 6. In a sterile hood transfer embryogenic callus into diluted Agrobacerium solution and incubate for 30 minutes.
[0798] 7. In a sterile hood blot callus tissue on sterile filter paper and transfer on MS-AS plates.
[0799] 8. Co-culture plates in 22° C. growth chamber in the dark for two days.
[0800] 9. In a sterile hood transfer callus tissue to MS-Tim plates for the tissue recovery (the presence of Timentin will prevent Agrobacterium growth).
[0801] 10. Incubate tissue on MS-Tim media for two days at 22° C. in the dark.
[0802] 11. Remove callus tissue from the plates and stain for 48 hrs. in GUS staining solution.
[0803] 12. De-stain tissue in 70% EtOH for 24 hours.
   Recipes:

[0804] KCMS media (liquid), pH to 5.5
[0805] 100 ml/l MS Major Salts, 10 ml/l MS Minor Salts, 5 ml/l MS iron stock, 0.5M K₂HPO₄, 0.1 mg/ml Myo-Inositol,
[0806] 1.3 μg/ml Thiamine, 0.2 g/ml 2,4-D (1 mg/ml), 0.1 g/ml Kinetin, 3% Sucrose, 100?M Acetosyringo

[0807] MS-CIM media. pH 5.8
[0808] MS Basal salt (4.3 g/L), B5 Vitamins (200×) (5 m/L), 2% Sucrose (20 g/L), Proline (500 mg/L), Glutamine (500 mg/L), Casein Hydrolysate (300 mg/L), 2? g/ml 2,4-D, Phytagel (3 g/L)

[0809] MS-As Medium, pH 5.8
[0810] MS Basal salt (4.3 g/L), B5 Vitamins (200×) (5 m/L), 2% Sucrose (20 g/L), Proline (500 mg/l), Glutamine (500 mg/L), Casein Hydrolysate (300 mg/L), 2? g/ml 2,4-D, Phytagel (3 g/L), 200 ? M Acetosyringone

[0811] MS-Tim media, pH 5.8
[0812] MS Basal salt (4.3 g/L), B5 Vitamins (200×) (5 m/L), 2% Sucrose (20 g/L), Proline (500 mg/L), Glutamine (500 mg/L), Casein Hydrolysate (300 mg(L), 2? g/ml 2,4-D, Phytagel (3 g/L), 400 mg/l Timentin

[0813] Gus staining solution, pH 7
[0814] 0.3 M Mannitol; 0.02 M EDTA, pH=7.0; 0.04 NaH₂PO₄; 1 mM x-gluc
   The binary Promoter::Reporter Plasmids described in Example 9 above can also be used for stable transformation of rice and maize plants according to the protocols provided in Examples 10.1 and 10.2, respectively.

### Example 13

### Analysis of Mutant and transgenic Plant Material

[0815] Two tiers of assays are can be used for analysis of the mutant and transgenic plant material.
[0816] Near InfraRed (NIR) spectrophometric analysis of seeds.
[0817] NIR enables evaluation of changes in starch, oil, protein and fiber content at very high throughput (I sample/sec).
[0818] DIA or MRJ Imaging

[0819] DIA or MRI imaging allows observation of gross morphology and surface area of major seed tissues and compartments (embryo, aleurone, endosperm, seed coat). Transgenic lines can also be physically sectioned and directly observed for changes in seed compartment morphology.

[0820] Lines showing alterations in grain composition will be advanced to a second tier of assays dependent upon the nature of the change detected:
[0821] 1) Protein track: 1-D and 2-D protein gels Protein profiles
[0822] HPLC Amino acid profiles
[0823] DNTB or papain staining Protein redox status
[0824] GC N/C/S ratios
[0825] 2) Starch track: Iodine staining Content, branching
[0826] Glucose-6-P analysis Phosphorylation level
[0827] 3) Oils track: GC Oil, fatty acid profile

### Example 14

### Chromosomal Markers to Identify the Location of a Nucleic Acid Sequence

[0828] The sequences of the present invention can also be used for SSR mapping. SSR mapping in rice has been described by Miyao et al. (DNA Res 3:233 (1996)) and Yang et al. (Mol Gen Genet 245:187 (1994)), and in maize by Ahn et al. (Mol Gen Genet 241:483 (1993)). SSR mapping can be achieved using various methods. In one instance, polymorphisms are identified when sequence specific probes flanking an SSR contained within a sequence are made and used in polymerase chain reaction (PCR) assays with template DNA from two or more individuals or, in plants, near isogenic lines. A change in the number of tandem repeats between the SSR-flanking sequence produces differently sized fragments (U.S. Pat. No. 5,766,847). Alternatively, polymorphisms can be identified by using the PCR fragment produced from the SSR-flanking sequence specific primer reaction as a probe against Southern blots representing different individuals (Refseth et al., Electrophoresis 18:1519 (1997)). Rice SSRs can be used to map a molecular marker closely linked to functional gene, as described by Akagi et al. (Genome 39:205 (1996)).

[0829] The sequences of the present invention can be used to identify and develop a variety of microsatellite markers, including the SSRs described above, as genetic markers for comparative analysis and mapping of genomes.

[0830] Many of the polynucleotides listed in Tables 2 to 11 contain at least 3 consecutive di-, tri- or tetranucleotide repeat units in their coding region that can potentially be developed into SSR markers. Trinucleotide motifs that can be commonly found in the coding regions of said polynucleotides and easily identified by screening the polynucleotides sequences for said motifs are, for example: CGG; GCC, CGC, GGC, etc. Once such a repeat unit has been found, primers can be designed which are complementary to the region flanking the repeat unit and used in any of the methods described below.

[0831] Sequences of the present invention can also be used in a variation of the SSR technique known as inter-SSR (ISSR), which uses microsatellite oligonucleotides as primers to amplify genomic segments different from the repeat region itself (Zietkiewicz et al., Genomics 20:176 (1994)). ISSR employs oligonucleotides based on a simple sequence repeat anchored or not at their 5′- or 3′-end by two to four arbitrarily chosen nucleotides, which triggers site-specific annealing and initiates PCR amplification of genomic segments which are flanked by inversely orientated and closely spaced repeat sequences. In one embodiment of the present invention, microsatellite markers as disclosed herein, or substantially similar sequences or allelic variants thereof, may be used to detect the appearance or disappearance of markers indicating genomic instability as described by Leroy et al. (Electron. J Biotechnol, 3(2), at http://www.ejb.org (2000)), where alteration of a fingerprinting pattern indicated loss of a marker corresponding to a part of a gene involved in the regulation of cell proliferation. Microsatellite markers are useful for detecting genomic alterations such as the change observed by Leroy et al. (Electron. J Biotechnol, 3(2), supra (2000)) which appeared to be the consequence of microsatellite instability at the primer binding site or modification of the region between the microsatellites, and illustrated somaclonal variation leading to genomic instability. Consequently, sequences of the present invention are useful for detecting genomic alterations involved in somaclonal variation, which is an important source of new phenotypes.

[0832] In addition, because the genomes of closely related species are largely syntenic (that is, they display the same ordering of genes within the genome), these maps can be used to isolate novel alleles from wild relatives of crop species by positional cloning strategies. This shared synteny is very powerful for using genetic maps from one species to map genes in another. For example, a gene mapped in rice provides information for the gene location in maize and wheat.

### Example 15

### Quantitative Trait Linked Breeding

[0833] Various types of maps can be used with the sequences of the invention to identify Quantitative Trait Loci (QTLs) for a variety of uses, including marker-assisted breeding. Many important crop traits are quantitative traits and result from the combined interactions of several genes. These genes reside at different loci in the genome, often on different chromosomes, and generally exhibit multiple alleles at each locus. Developing markers, tools, and methods to identify and isolate the QTLs involved in a trait, enables marker-assisted breeding to enhance desirable traits or suppress undesirable traits. The sequences disclosed herein can be used as markers for QTLs to assist marker-assisted breeding. The sequences of the invention can be used to identify QTLs and isolate alleles as described by Li et al. in a study of QTLs involved in resistance to a pathogen of rice. (Li et al., Mol Gen Genet 261:58 (1990)). In addition to isolating QTL alleles in rice, other cereals, and other monocot and dicot crop species, the sequences of the invention can also be used to isolate alleles from the corresponding QTL(s) of wild relatives. Transgenic plants having various combinations of QTL alleles can then be created and the effects of the combinations measured. Once an ideal allele combination has been identified, crop improvement can be accomplished either through biotechnological means or by directed conventional breeding programs. (Flowers et al., J Exp Bot 51:99 (2000); Tanksley and McCouch, Science 277:1063 (1997)).

### Example 16

### Marker-Assisted Breeding

[0834] Markers or genes associated with specific desirable or undesirable traits are known and used in marker assisted breeding programs. It is particularly beneficial to be able to screen large numbers of markers and large numbers of candidate parental plants or progeny plants. The methods of the invention allow high volume, multiplex screening for numerous markers from numerous individuals simultaneously.

[0835] Markers or genes associated with specific desirable or undesirable traits are known and used in marker assisted breeding programs. It is particularly beneficial to be able to screen large numbers of markers and large numbers of candidate parental plants or progeny plants. The methods of the invention allow high volume, multiplex screening for numerous markers from numerous individuals simultaneously.

[0836] A multiplex assay is designed providing SSRs specific to each of the markers of interest. The SSRs are linked to different classes of beads. All of the relevant markers may be expressed genes, so RNA or cDNA techniques are appropriate. RNA is extracted from root tissue of 1000 different individual plants and hybridized in parallel reactions with the different classes of beads. Each class of beads is analyzed for each sample using a microfluidics analyzer. For the classes of beads corresponding to qualitative traits, qualitative measures of presence or absence of the target gene are recorded. For the classes of beads corresponding to quantitative traits, quantitative measures of gene activity are recorded. Individuals showing activity of all of the qualitative genes and highest expression levels of the quantitative traits are selected for further breeding steps. In procedures wherein no individuals have desirable results for all the measured genes, individuals having the most desirable, and fewest undesirable, results are selected for further breeding steps. In either case, progeny are screened to further select for homozygotes with high quantitative levels of expression of the quantitative traits.

### Example 17

### Method of Modifying the Gene Frequency

[0837] The invention further provides a method of modifying the frequency of a gene in a plant population, including the steps of: identifying an SSR within a coding region of a gene; screening a plurality of plants using the SSR as a marker to determine the presence or absence of the gene in an individual plant; selecting at least one individual plant for breeding based on the presence or absence of the gene; and breeding at least one plant thus selected to produce a population of plants having a modified frequency of the gene. The identification of the SSR within the coding region of a gene can be accomplished based on sequence similarity between the nucleic acid molecules of the invention and the region within the gene of interest flanking the SSR.

[0838] Supporting TABLES

TABLE 12
This table illustrates the correlation between
rice sequences in sub-groups I and III that show
homologies between 80% and 99.9% to each other

| Sub-Group II | Sub-Group I |
|---|---|
| Sequences | Sequences |
| SEQ ID NO | SEQ ID NO |
| 513 | 121, 123 |
| 515 | 333 |
| 517 | 441; 443 |
| 519 | 151 |
| 521 | 9 |
| 523 | 73 |
| 525 | 203 |
| 527 | 215 |
| 529 | 209 |
| 531 | 103 |
| 533 | 407 |
| 535 | 115 |
| 537 | 165 |
| 539 | 1 |
| 541 | 325 |
| 543 | 397 |
| 545 | 61 |
| 547 | 455 |
| 549 | 255 |
| 551 | 351 |
| 553 | 225 |
| 555 | 139 |
| 557 | 25 |
| 559 | 3 |
| 561 | 17 |
| 563 | 279 |
| 565 | 191 |
| 567 | 451 |
| 569 | 417 |
| 571 | 99; 95; 435 |
| 573 | 91; 81 |
| 575 | 95; 99 |
| 577 | 85 |
| 579 | 229; 223 |
| 581 | 83 |
| 583 | 401; 235 |
| 585 | 283 |
| 587 | 179 |
| 589 | 135 |
| 591 | 141 |
| 595 | 5 |
| 597 | 311 |
| 599 | 379 |
| 601 | 123; 121 |
| 603 | 335 |
| 605 | 287 |
| 607 | 161 |
| 609 | 69 |
| 611 | 177 |
| 615 | 413 |
| 617 | 143 |
| 619 | 251 |
| 621 | 331 |
| 623 | 375 |
| 625 | 67 |
| 627 | 387 |
| 629 | 81; 91 |
| 631 | 89 |
| 633 | 181 |
| 635 | 297 |
| 637 | 309 |
| 639 | 329 |
| 641 | 229 |
| 593, 613 | 221 |

[0839] TABLE 13
This table illustrates the correlation between
rice sequences in subgroups I and II

| | |
|---|---|
| 155 | 507 |
| 191 | 503 |
| 89 | 509 |
| 187 | 505 |
| 299 | 501 |
| 447 | 511 |

[0840] TABLE 14
Description of “Grain Filling”
QTLs identified in Tables 2 and 3

QTL: OS-AE-1-1
Species: Oryza sativa
General Trait: DEVELOPMENT
Specific Trait: Allelopathic effect
Citation: BREEDING SCIENCE (2001) 51: 47-51
Chromosome: 1
Flanking Markers(s):
QTL: OS-AE-11-1
Species: Oryza sativa
General Trait: DEVELOPMENT
Specific Trait: Allelopathic effect
Citation: BREEDING SCIENCE (2001) 51: 47-51
Chromosome: 11
Flanking Markers(s):
QTL: OS-AE-12-1
Species: Oryza sativa
General Trait: DEVELOPMENT
Specific Trait: Allelopathic effect
Citation: BREEDING SCIENCE (2001) 51: 47-51
Chromosome: 12
Flanking Markers(s):
QTL: OS-AE-5-1
Species: Oryza sativa
General Trait: DEVELOPMENT
Specific Trait: Allelopathic effect
Citation: BREEDING SCIENCE (2001) 51: 47-51
Chromosome: 5
Flanking Markers(s):
QTL: OS-AMY-5-1
Species: Oryza sativa
General Trait: QUALITY
Specific Trait: Amylose content
Citation: THEOR APPL GENET (1999) 98: 502-508
Chromosome: 5
Flanking Markers(s):
QTL: OS-AMY-6-1
Species: Oryza sativa
General Trait: QUALITY
Specific Trait: Amylose content
Citation: THEOR APPL GENET (1999) 99: 642-648
Chromosome: 6
Flanking Markers(s):
QTL: OS-AMY-6-2
Species: Oryza sativa
General Trait: QUALITY
Specific Trait: Amylose content
Citation: THEOR APPL GENET (1999) 98: 502-508
Chromosome: 6
Flanking Markers(s):
QTL: OS-APDF-9-1
Species: Oryza sativa
General Trait: DEVELOPMENT
Specific Trait: Albino plantlet differentiation frequency
Citation: MOLECULAR BREEDING (1998) 4: 165-172
Chromosome: 9
Flanking Markers(s):
QTL: OS-ASS-6-1
Species: Oryza sativa
General Trait: QUALITY
Specific Trait: Alkali spreading score
Citation: THEOR APPL GENET (1999) 98: 502-508
Chromosome: 6
Flanking Markers(s):
QTL: OS-ASS-6-2
Species: Oryza sativa
General Trait: QUALITY
Specific Trait: Alkali spreading score
Citation: THEOR APPL GENET (1999) 98: 502-508
Chromosome: 6
Flanking Markers(s):
QTL: OS-BDV-1-1
Species: Oryza sativa
General Trait: QUALITY
Specific Trait: Breakdown viscosity
Citation: THEOR APPL GENET (2000) 100: 280-284
Chromosome: 1
Flanking Markers(s):
QTL: OS-BDV-6-1
Species: Oryza sativa
General Trait: QUALITY
Specific Trait: Breakdown viscosity
Citation: THEOR APPL GENET (2000) 100: 280-284
Chromosome: 6
Flanking Markers(s):
QTL: OS-CHALK-1-1
Species: Oryza sativa
General Trait: QUALITY
Specific Trait: Grain chalkiness
Citation: THEOR APPL GENET (2000) 101: 823-829
Chromosome: 1
Flanking Markers(s): 0
QTL: OS-CHALK-10-1
Species: Oryza sativa
General Trait: QUALITY
Specific Trait: Grain chalkiness
Citation: THEOR APPL GENET (2000) 101: 823-829
Chromosome: 10
Flanking Markers(s): 83.5
QTL: OS-CHALK-6-1
Species: Oryza sativa
General Trait: QUALITY
Specific Trait: Grain chalkiness
Citation: THEOR APPL GENET (2000) 101: 823-829
Chromosome: 6
Flanking Markers(s): 12.5
QTL: OS-CIF-6-1
Species: Oryza sativa
General Trait: DEVELOPMENT
Specific Trait: Callus induction frequency
Citation: MOLECULAR BREEDING (1998) 4: 165-172
Chromosome: 6
Flanking Markers(s):
QTL: OS-CPV-1-1
Species: Oryza sativa
General Trait: QUALITY
Specific Trait: Cool paste viscosity
Citation: THEOR APPL GENET (2000) 100: 280-284
Chromosome: 1
Flanking Markers(s):
QTL: OS-CPV-6-1
Species: Oryza sativa
General Trait: QUALITY
Specific Trait: Cool paste viscosity
Citation: THEOR APPL GENET (2000) 100: 280-284
Chromosome: 6
Flanking Markers(s):
QTL: OS-CPV-6-2
Species: Oryza sativa
General Trait: QUALITY
Specific Trait: Cool paste viscosity
Citation: THEOR APPL GENET (2000) 100: 280-284
Chromosome: 6
Flanking Markers(s):
QTL: OS-CSV-1-1
Species: Oryza sativa
General Trait: QUALITY
Specific Trait: Consistency viscosity
Citation: THEOR APPL GENET (2000) 100: 280-284
Chromosome: 1
Flanking Markers(s):
QTL: OS-CSV-6-1
Species: Oryza sativa
General Trait: QUALITY
Specific Trait: Consistency viscosity
Citation: THEOR APPL GENET (2000) 100: 280-284
Chromosome: 6
Flanking Markers(s):
QTL: OS-CSV-6-2
Species: Oryza sativa
General Trait: QUALITY
Specific Trait: Consistency viscosity
Citation: THEOR APPL GENET (2000) 100: 280-284
Chromosome: 6
Flanking Markers(s):
QTL: OS-DM-6-1
Species: Oryza sativa
General Trait: YIELD
Specific Trait: Dry Mass
Citation: PLANT PHYSIOLOGY (2001) 125: 406-422
Chromosome: 6
Flanking Markers(s): 16.7
QTL: OS-FLLEN-3-1
Species: Oryza sativa
General Trait: YIELD
Specific Trait: Source-sink capacity
Citation: MOLECULAR BREEDING (1998) 4: 419-426
Chromosome: 2
Flanking Markers(s): 160
QTL: OS-FLLEN-9-1
Species: Oryza sativa
General Trait: YIELD
Specific Trait: Source-sink capacity
Citation: MOLECULAR BREEDING (1998) 4: 419-426
Chromosome: 4
Flanking Markers(s):
QTL: OS-FLWID-3-1
Species: Oryza sativa
General Trait: YIELD
Specific Trait: Source-sink capacity
Citation: MOLECULAR BREEDING (1998) 4: 419-426
Chromosome: 8
Flanking Markers(s):
QTL: OS-GC-2-1
Species: Oryza sativa
General Trait: QUALITY
Specific Trait: Gel consistency
Citation: THEOR APPL GENET (1999) 98: 502-508
Chromosome: 2
Flanking Markers(s):
QTL: OS-GC-6-1
Species: Oryza sativa
General Trait: QUALITY
Specific Trait: Gel consistency
Citation: THEOR APPL GENET (1999) 99: 642-648
Chromosome: 6
Flanking Markers(s):
QTL: OS-GP-1-1
Species: Oryza sativa
General Trait: YIELD
Specific Trait: Grains per panicle
Citation: THEOR APPL GENET (2000) 101: 248-254
Chromosome: 1
Flanking Markers(s):
QTL: OS-GP-6-1
Species: Oryza sativa
General Trait: YIELD
Specific Trait: Grains per panicle
Citation: THEOR APPL GENET (2000) 101: 248-254
Chromosome: 6
Flanking Markers(s):
QTL: OS-GPDF-1-1
Species: Oryza sativa
General Trait: DEVELOPMENT
Specific Trait: Green plantlet differentiation frequency
Citation: MOLECULAR BREEDING (1998) 4: 165-172
Chromosome: 1
Flanking Markers(s):
QTL: OS-GPL-1-1
Species: Oryza sativa
General Trait: YIELD
Specific Trait: Grains per plant
Citation: GENETICS (1998) 150: 899-909
Chromosome: 1
Flanking Markers(s):
QTL: OS-GPL-2-1
Species: Oryza sativa
General Trait: YIELD
Specific Trait: Grains per plant
Citation: GENETICS (1998) 150: 899-909
Chromosome: 2
Flanking Markers(s):
QTL: OS-GPL-4-1
Species: Oryza sativa
General Trait: YIELD
Specific Trait: Grains per plant
Citation: GENETICS (1998) 150: 899-909
Chromosome: 4
Flanking Markers(s):
QTL: OS-GPL-8-2
Species: Oryza sativa
General Trait: YIELD
Specific Trait: Grains per plant
Citation: GENETICS (1998) 150: 899-909
Chromosome: 8
Flanking Markers(s):
QTL: OS-GPP-4-1
Species: Oryza sativa
General Trait: YIELD
Specific Trait: Grains per panicle
Citation: GENETICS (1998) 150: 899-909
Chromosome: 4
Flanking Markers(s):
QTL: OS-GPP-8-2
Species: Oryza sativa
General Trait: YIELD
Specific Trait: Grains per panicle
Citation: GENETICS (1998) 150: 899-909
Chromosome: 8
Flanking Markers(s):
QTL: OS-GPYF-1-1
Species: Oryza sativa
General Trait: DEVELOPMENT
Specific Trait: Green plantlet yield frequency
Citation: MOLECULAR BREEDING (1998) 4: 165-172
Chromosome: 1
Flanking Markers(s):
QTL: OS-GW-1-2
Species: Oryza sativa
General Trait: YIELD
Specific Trait: 1000 grain weight
Citation: THEOR APPL GENET (2001) 102: 41-52
Chromosome: 1
Flanking Markers(s):
QTL: OS-GW-3-1
Species: Oryza sativa
General Trait: YIELD
Specific Trait: Grain weight - 1000 grains
Citation: GENETICS (1998) 150: 899-909
Chromosome: 3
Flanking Markers(s):
QTL: OS-GW-3-1
Species: Oryza sativa
General Trait: YIELD
Specific Trait: Grain weight
Citation: THEOR APPL GENET (2000) 101: 248-254
Chromosome: 3
Flanking Markers(s):
QTL: OS-GW-3-1
Species: Oryza sativa
General Trait: YIELD
Specific Trait: 1000 grain weight
Citation: THEOR APPL GENET (2001) 102: 41-52
Chromosome: 3
Flanking Markers(s):
QTL: OS-GW-5-1
Species: Oryza sativa
General Trait: YIELD
Specific Trait: Grain weight - 1000 grains
Citation: GENETICS (1998) 150: 899-909
Chromosome: 5
Flanking Markers(s):
QTL: OS-GW-5-1
Species: Oryza sativa
General Trait: YIELD
Specific Trait: Grain weight
Citation: THEOR APPL GENET (2000) 101: 248-254
Chromosome: 5
Flanking Markers(s):
QTL: OS-GW-9-1
Species: Oryza sativa
General Trait: YIELD
Specific Trait: Grain weight - 1000 grains
Citation: GENETICS (1998) 150: 899-909
Chromosome: 9
Flanking Markers(s):
QTL: OS-GW100-4-1
Species: Oryza sativa
General Trait: YIELD
Specific Trait: Grain weight - 100 grains
Citation: THEOR APPL GENET (1998) 96: 957-963
Chromosome: 4
Flanking Markers(s): 100
QTL: OS-GYLD-1-1
Species: Oryza sativa
General Trait: YIELD
Specific Trait: Grain yield - tons/ha
Citation: GENETICS (1998) 150: 899-909
Chromosome: 1
Flanking Markers(s):
QTL: OS-GYLD-2-1
Species: Oryza sativa
General Trait: YIELD
Specific Trait: Grain yield - tons/ha
Citation: GENETICS (1998) 150: 899-909
Chromosome: 2
Flanking Markers(s):
QTL: OS-GYLD-4-1
Species: Oryza sativa
General Trait: YIELD
Specific Trait: Grain yield - tons/ha
Citation: GENETICS (1998) 150: 899-909
Chromosome: 4
Flanking Markers(s):
QTL: OS-GYLD-8-2
Species: Oryza sativa
General Trait: YIELD
Specific Trait: Grain yield - tons/ha
Citation: GENETICS (1998) 150: 899-909
Chromosome: 8
Flanking Markers(s):
QTL: OS-HPV-6-1
Species: Oryza sativa
General Trait: QUALITY
Specific Trait: Hot paste viscosity
Citation: THEOR APPL GENET (2000) 100: 280-284
Chromosome: 6
Flanking Markers(s):
QTL: OS-HPV-6-2
Species: Oryza sativa
General Trait: QUALITY
Specific Trait: Hot paste viscosity
Citation: THEOR APPL GENET (2000) 100: 280-284
Chromosome: 6
Flanking Markers(s):
QTL: OS-PGWC-8-1
Species: Oryza sativa
General Trait: QUALITY
Specific Trait: Percentage of grain with white core
Citation: THEOR APPL GENET (1999) 98: 502-508
Chromosome: 8
Flanking Markers(s):
QTL: OS-REGEN-3-1
Species: Oryza sativa
General Trait: DEVELOPMENT
Specific Trait: Regeneration ability
Citation: THEOR APPL GENET (1999) 98: 243-251
Chromosome: 3
Flanking Markers(s): 9
QTL: OS-RGT-2-1
Species: Oryza sativa
General Trait: DEVELOPMENT
Specific Trait: Reproductive growth time
Citation: THEOR APPL GENET (2001) 102: 1236-1242
Chromosome: 2
Flanking Markers(s):
QTL: OS-RGT-5-1
Species: Oryza sativa
General Trait: DEVELOPMENT
Specific Trait: Reproductive growth time
Citation: THEOR APPL GENET (2001) 102: 1236-1242
Chromosome: 5
Flanking Markers(s):
QTL: OS-SBV-1-1
Species: Oryza sativa
General Trait: QUALITY
Specific Trait: Setback viscosity
Citation: THEOR APPL GENET (2000) 100: 280-284
Chromosome: 1
Flanking Markers(s):
QTL: OS-SBV-6-1
Species: Oryza sativa
General Trait: QUALITY
Specific Trait: Setback viscosity
Citation: THEOR APPL GENET (2000) 100: 280-284
Chromosome: 6
Flanking Markers(s):
QTL: OS-VGT-2-1
Species: Oryza sativa
General Trait: DEVELOPMENT
Specific Trait: Vegetative growth time
Citation: THEOR APPL GENET (2001) 102: 1236-1242
Chromosome: 2
Flanking Markers(s):
QTL: OS-VGT-2-2
Species: Oryza sativa
General Trait: DEVELOPMENT
Specific Trait: Vegetative growth time
Citation: THEOR APPL GENET (2001) 102: 1236-1242
Chromosome: 2
Flanking Markers(s):
QTL: OS-VGT-5-1
Species: Oryza sativa
General Trait: DEVELOPMENT
Specific Trait: Vegetative growth time
Citation: THEOR APPL GENET (2001) 102: 1236-1242
Chromosome: 5
Flanking Markers(s):
QTL: OS-VGT-9-1
Species: Oryza sativa
General Trait: DEVELOPMENT
Specific Trait: Vegetative growth time
Citation: THEOR APPL GENET (2001) 102: 1236-1242
Chromosome: 9
Flanking Markers(s):
QTL: OS-WC-6-1
Species: Oryza sativa
General Trait: QUALITY
Specific Trait: Grain white core
Citation: THEOR APPL GENET (2000) 101: 823-829
Chromosome: 6
Flanking Markers(s): 13.5
QTL: OS-Y-6-1
Species: Oryza sativa
General Trait: YIELD
Specific Trait: Yield
Citation: THEOR APPL GENET (2000) 101: 248-254
Chromosome: 6
Flanking Markers(s):
QTL: OS-YLD-1-1
Species: Oryza sativa
General Trait: YIELD
Specific Trait: Yield
Citation: THEOR APPL GENET (2001) 102: 41-52
Chromosome: 1
Flanking Markers(s):
QTL: OS-YLD-5-1
Species: Oryza sativa
General Trait: YIELD
Specific Trait: Yield
Citation: THEOR APPL GENET (2001) 102: 793-800
Chromosome: 5
Flanking Markers(s):
QTL: ZM-BIOM-3-1
Species: Zea mays
General Trait: YIELD
Specific Trait: “Biomass, above ground”
Citation: THEOR APPL GENET (1999) 99: 1106-1119
Chromosome: 3
Flanking Markers(s): “UMC3, UMC96”
QTL: ZM-BIOM-5-1
Species: Zea mays
General Trait: YIELD
Specific Trait: “Biomass, above ground”
Citation: THEOR APPL GENET (1999) 99: 1106-1119
Chromosome: 5
Flanking Markers(s): UMC166
QTL: ZM-BIOM-7-1
Species: Zea mays
General Trait: YIELD
Specific Trait: “Biomass, above ground”
Citation: THEOR APPL GENET (1999) 99: 1106-1119
Chromosome: 7
Flanking Markers(s): “UMC116, BNL14.07”
QTL: ZM-BIOM-8-1
Species: Zea mays
General Trait: YIELD
Specific Trait: “Biomass, above ground”
Citation: THEOR APPL GENET (1999) 99: 1106-1119
Chromosome: 8
Flanking Markers(s): “UMC138L, UMC12”
QTL: ZM-CL-9-1
Species: Zea mays
General Trait: QUALITY
Specific Trait: Cellulose content
Citation: THEOR APPL GENET (2001) 102: 591-599
Chromosome: 9
Flanking Markers(s):
QTL: ZM-CPC-1-2
Species: Zea mays
General Trait: QUALITY
Specific Trait: Crude protein concentration
Citation: CROP SCI (1998) 38: 1278-1289
Chromosome: 1
Flanking Markers(s): UMC76
QTL: ZM-CPC-1-2
Species: Zea mays
General Trait: QUALITY
Specific Trait: Crude protein content
Citation: CROP SCI (2001) 41: 690-697
Chromosome: 1
Flanking Markers(s): 224
QTL: ZM-CPC-1-3
Species: Zea mays
General Trait: QUALITY
Specific Trait: Crude protein concentration
Citation: CROP SCI (1998) 38: 1278-1289
Chromosome: 1
Flanking Markers(s): UMC58
QTL: ZM-CPC-1-4
Species: Zea mays
General Trait: QUALITY
Specific Trait: Crude protein concentration
Citation: CROP SCI (1998) 38: 1278-1289
Chromosome: 1
Flanking Markers(s): UMC128
QTL: ZM-CPC-1-5
Species: Zea mays
General Trait: QUALITY
Specific Trait: Crude protein concentration
Citation: CROP SCI (1998) 38: 1278-1289
Chromosome: 1
Flanking Markers(s): UMC67
QTL: ZM-CPC-1-6
Species: Zea mays
General Trait: QUALITY
Specific Trait: Crude protein concentration
Citation: CROP SCI (1998) 38: 1278-1289
Chromosome: 1
Flanking Markers(s): UMC83
QTL: ZM-CPC-10-1
Species: Zea mays
General Trait: QUALITY
Specific Trait: Crude protein concentration
Citation: CROP SCI (1998) 38: 1278-1289
Chromosome: 10
Flanking Markers(s): UMC130
QTL: ZM-CPC-3-1
Species: Zea mays
General Trait: QUALITY
Specific Trait: Crude protein concentration
Citation: CROP SCI (1998) 38: 1278-1289
Chromosome: 3
Flanking Markers(s): UMC154
QTL: ZM-CPC-3-2
Species: Zea mays
General Trait: QUALITY
Specific Trait: Crude protein concentration
Citation: CROP SCI (1998) 38: 1278-1289
Chromosome: 3
Flanking Markers(s): BNL1.297
QTL: ZM-CPC-3-3
Species: Zea mays
General Trait: QUALITY
Specific Trait: Crude protein concentration
Citation: CROP SCI (1998) 38: 1278-1289
Chromosome: 3
Flanking Markers(s): UMC10
QTL: ZM-CPC-5-1
Species: Zea mays
General Trait: QUALITY
Specific Trait: Crude protein concentration
Citation: CROP SCI (1998) 38: 1278-1289
Chromosome: 5
Flanking Markers(s): BNL6.22
QTL: ZM-CPC-6-2
Species: Zea mays
General Trait: QUALITY
Specific Trait: Crude protein concentration
Citation: CROP SCI (1998) 38: 1278-1289
Chromosome: 6
Flanking Markers(s): UMC85
QTL: ZM-CPC-7-2
Species: Zea mays
General Trait: QUALITY
Specific Trait: Crude protein concentration
Citation: CROP SCI (1998) 38: 1278-1289
Chromosome: 7
Flanking Markers(s): UMC98B
QTL: ZM-CPC-7-3
Species: Zea mays
General Trait: QUALITY
Specific Trait: Crude protein concentration
Citation: CROP SCI (1998) 38: 1278-1289
Chromosome: 7
Flanking Markers(s): UMC56
QTL: ZM-CPC-8-1
Species: Zea mays
General Trait: QUALITY
Specific Trait: Crude protein concentration
Citation: CROP SCI (1998) 38: 1278-1289
Chromosome: 8
Flanking Markers(s): UMC71
QTL: ZM-DMC-1-1
Species: Zea mays
General Trait: YIELD
Specific Trait: Dry matter concentration
Citation: CROP SCI (1998) 38: 1278-1289
Chromosome: 1
Flanking Markers(s): UMC33
QTL: ZM-DMC-1-1
Species: Zea mays
General Trait: YIELD
Specific Trait: Dry matter concentration
Citation: THEOR APPL GENET (2001) 102: 230-243
Chromosome: 1
Flanking Markers(s):
QTL: ZM-DMC-1-2
Species: Zea mays
General Trait: YIELD
Specific Trait: Dry matter concentration
Citation: CROP SCI (1998) 38: 1278-1289
Chromosome: 1
Flanking Markers(s): UMC128
QTL: ZM-DMC-10-1
Species: Zea mays
General Trait: YIELD
Specific Trait: Dry matter concentration
Citation: CROP SCI (1998) 38: 1278-1289
Chromosome: 10
Flanking Marker(s): UMC146
QTL: ZM-DMC-10-1
Species: Zea mays
General Trait: YIELD
Specific Trait: Dry matter concentration
Citation: THEOR APPL GENET (2001) 102: 230-243
Chromosome: 10
Flanking Markers(s):
QTL: ZM-DMC-10-2
Species: Zea mays
General Trait: YIELD
Specific Trait: Dry matter concentration
Citation: CROP SCI (1998) 38: 1278-1289
Chromosome: 10
Flanking Markers(s): UMC146
QTL: ZM-DMC-2-3
Species: Zea mays
General Trait: YIELD
Specific Trait: Dry matter concentration
Citation: THEOR APPL GENET (2001) 102: 230-243
Chromosome: 2
Flanking Markers(s):
QTL: ZM-DMC-5-1
Species: Zea mays
General Trait: YIELD
Specific Trait: Dry matter concentration
Citation: CROP SCI (1998) 38: 1278-1289
Chromosome: 5
Flanking Markers(s): UMC68
QTL: ZM-DMC-5-1
Species: Zea mays
General Trait: YIELD
Specific Trait: Dry matter content
Citation: CROP SCI (2001) 41: 690-697
Chromosome: 5
Flanking Markers(s): 116
QTL: ZM-DMC-5-1
Species: Zea mays
General Trait: YIELD
Specific Trait: Dry matter concentration
Citation: THEOR APPL GENET (2001) 102: 230-243
Chromosome: 5
Flanking Markers(s):
QTL: ZM-DMC-6-1
Species: Zea mays
General Trait: YIELD
Specific Trait: Dry matter concentration
Citation: CROP SCI (1998) 38: 1278-1289
Chromosome: 6
Flanking Markers(s): UMC85
QTL: ZM-DMC-6-1
Species: Zea mays
General Trait: YIELD
Specific Trait: Dry matter concentration
Citation: THEOR APPL GENET (2001) 102: 230-243
Chromosome: 6
Flanking Markers(s):
QTL: ZM-DMC-6-2
Species: Zea mays
General Trait: YIELD
Specific Trait: Dry matter concentration
Citation: CROP SCI (1998) 38: 1278-1289
Chromosome: 6
Flanking Marker(s): UMC59
QTL: ZM-DMC-8-1
Species: Zea mays
General Trait: YIELD
Specific Trait: Dry matter concentration
Citation: CROP SCI (1998) 38: 1278-1289
Chromosome: 8
Flanking Markers(s): UMC117
QTL: ZM-DMC-8-1
Species: Zea mays
General Trait: YIELD
Specific Trait: Dry matter content
Citation: CROP SCI (2001) 41: 690-697
Chromosome: 8
Flanking Markers(s): 132
QTL: ZM-DMC-8-1
Species: Zea mays
General Trait: YIELD
Specific Trait: Dry matter concentration
Citation: THEOR APPL GENET (2001) 102: 230-243
Chromosome: 8
Flanking Markers(s):
QTL: ZM-DMC-8-2
Species: Zea mays
General Trait: YIELD
Specific Trait: Dry matter concentration
Citation: CROP SCI (1998) 38: 1278-1289
Chromosome: 8
Flanking Markers(s): UMC71
QTL: ZM-DMC-8-2
Species: Zea mays
General Trait: YIELD
Specific Trait: Dry matter content
Citation: CROP SCI (2001) 41: 690-697
Chromosome: 8
Flanking Markers(s): 176
QTL: ZM-DMY-1-2
Species: Zea mays
General Trait: YIELD
Specific Trait: Dry matter yield
Citation: CROP SCI (1998) 38: 1278-1289
Chromosome: 1
Flanking Markers(s): UMC167
QTL: ZM-DMY-1-3
Species: Zea mays
General Trait: YIELD
Specific Trait: Dry matter yield
Citation: CROP SCI (1998) 38: 1278-1289
Chromosome: 1
Flanking Markers(s): UMC83A
QTL: ZM-DMY-1-4
Species: Zea mays
General Trait: YIELD
Specific Trait: Dry matter yield
Citation: CROP SCI (1998) 38: 1278-1289
Chromosome: 1
Flanking Markers(s): BNL5.59
QTL: ZM-DMY-1-5
Species: Zea mays
General Trait: YIELD
Specific Trait: Dry matter yield
Citation: CROP SCI (1998) 38: 1278-1289
Chromosome: 1
Flanking Markers(s): UMC83
QTL: ZM-DMY-10-1
Species: Zea mays
General Trait: YIELD
Specific Trait: Dry matter yield
Citation: CROP SCI (1998) 38: 1278-1289
Chromosome: 10
Flanking Markers(s): UMC64
QTL: ZM-DMY-10-1
Species: Zea mays
General Trait: YIELD
Specific Trait: Dry matter yield
Citation: CROP SCI (2001) 41: 690-697
Chromosome: 10
Flanking Markers(s): 56
QTL: ZM-DMY-2-1
Species: Zea mays
General Trait: YIELD
Specific Trait: Dry matter yield
Citation: CROP SCI (1998) 38: 1278-1289
Chromosome: 2
Flanking Markers(s): UMC53
QTL: ZM-DMY-2-3
Species: Zea mays
General Trait: YIELD
Specific Trait: Dry matter yield
Citation: CROP SCI (1998) 38: 1278-1289
Chromosome: 2
Flanking Markers(s): UMC4
QTL: ZM-DMY-2-4
Species: Zea mays
General Trait: YIELD
Specific Trait: Dry matter yield
Citation: CROP SCI (1998) 38: 1278-1289
Chromosome: 2
Flanking Markers(s): UMC36
QTL: ZM-DMY-3-1
Species: Zea mays
General Trait: YIELD
Specific Trait Dry matter yield
Citation: CROP SCI (1998) 38: 1278-1289
Chromosome: 3
Flanking Markers(s): BNL6.16
QTL: ZM-DMY-3-2
Species: Zea mays
General Trait: YIELD
Specific Trait: Dry matter yield
Citation: CROP SCI (1998) 38: 1278-1289
Chromosome: 3
Flanking Markers(s): UMC154
QTL: ZM-DMY-3-3
Species: Zea mays
General Trait: YIELD
Specific Trait: Dry matter yield
Citation: CROP SCI (1998) 38: 1278-1289
Chromosome: 3
Flanking Markers(s): UMC10
QTL: ZM-DMY-4-1
Species: Zea mays
General Trait: YIELD
Specific Trait: Dry matter yield
Citation: CROP SCI (1998) 38: 1278-1289
Chromosome: 4
Flanking Markers(s): UMC31
QTL: ZM-DMY-4-2
Species: Zea mays
General Trait: YIELD
Specific Trait: Dry matter yield
Citation: CROP SCI (1998) 38: 1278-1289
Chromosome: 4
Flanking Markers(s): BNL7.65
QTL: ZM-DMY-4-3
Species: Zea mays
General Trait: YIELD
Specific Trait: Dry matter yield
Citation: CROP SCI (1998) 38: 1278-1289
Chromosome: 4
Flanking Markers(s): UMC42
QTL: ZM-DMY-4-4
Species: Zea mays
General Trait: YIELD
Specific Trait: Dry matter yield
Citation: CROP SCI (1998) 38: 1278-1289
Chromosome: 4
Flanking Markers(s): UMC127B
QTL: ZM-DMY-5-1
Species: Zea mays
General Trait: YIELD
Specific Trait: Dry matter yield
Citation: CROP SCI (1998) 38: 1278-1289
Chromosome: 5
Flanking Markers(s): BNL7.71
QTL: ZM-DMY-8-1
Species: Zea mays
General Trait: YIELD
Specific Trait: Dry matter yield
Citation: CROP SCI (1998) 38: 1278-1289
Chromosome: 8
Flanking Markers(s): UMC120
QTL: ZM-DMY-8-1
Species: Zea mays
General Trait: YIELD
Specific Trait: Dry matter yield
Citation: CROP SCI (2001) 41: 690-697
Chromosome: 8
Flanking Markers(s): 172
QTL: ZM-DMY-8-2
Species: Zea mays
General Trait: YIELD
Specific Trait: Dry matter yield
Citation: CROP SCI (1998) 38: 1278-1289
Chromosome: 8
Flanking Markers(s): UMC12A
QTL: ZM-DMY-9-1
Species: Zea mays
General Trait: YIELD
Specific Trait: Dry matter yield
Citation: CROP SCI (1998) 38: 1278-1289
Chromosome: 9
Flanking Markers(s): UMC95
QTL: ZM-EWT-2-1
Species: Zea mays
General Trait: YIELD
Specific Trait: Ear weight
Citation: THEOR APPL GENET (1999) 99: 280-288
Chromosome: 2
Flanking Markers(s): PHI083
QTL: ZM-EWT-4-2
Species: Zea mays
General Trait: YIELD
Specific Trait: Ear weight
Citation: THEOR APPL GENET (1999) 99: 280-288
Chromosome: 4
Flanking Markers(s): PHI093
QTL: ZM-GWE-9-1
Species: Zea mays
General Trait: YIELD
Specific Trait: Grain weight per ear
Citation: THEOR APPL GENET (2001) 102: 591-599
Chromosome: 9
Flanking Markers(s):
QTL: ZM-GWM2-1-1
Species: Zea mays
General Trait: YIELD
Specific Trait: “Yield, grain weight per square meter”
Citation: THEOR APPL GENET (1999) 99: 1106-1119
Chromosome: 1
Flanking Markers(s): “UMC163, UMC161”
QTL: ZM-GWM2-10-1
Species: Zea mays
General Trait: YIELD
Specific Trait: “Yield, grain weight per square meter”
Citation: THEOR APPL GENET (1999) 99: 1106-1119
Chromosome: 10
Flanking Markers(s): “UMC146, UMC44”
QTL: ZM-GWM2-3-1
Species: Zea mays
General Trait: YIELD
Specific Trait: “Yield, grain weight per square meter”
Citation: THEOR APPL GENET (1999) 99: 1106-1119
Chromosome: 3
Flanking Markers(s): “UMC92, UMC10”
QTL: ZM-GWM2-3-2
Species: Zea mays
General Trait: YIELD
Specific Trait: “Yield, grain weight per square meter”
Citation: THEOR APPL GENET (1999) 99: 1106-1119
Chromosome: 3
Flanking Markers(s): “UMC3, UMC96”
QTL: ZM-GWM2-7-1
Species: Zea mays
General Trait: YIELD
Specific Trait: “Yield, grain weight per square meter”
Citation: THEOR APPL GENET (1999) 99: 1106-1119
Chromosome: 7
Flanking Markers(s): “BNL15.40, UMC116”
QTL: ZM-GYHA-1-1
Species: Zea mays
General Trait: YIELD
Specific Trait: Grain yield per hectare
Citation: CROP SCI (1998) 38: 1296-1308
Chromosome: 1
Flanking Markers(s):
QTL: ZM-GYHA-1-2
Species: Zea mays
General Trait: YIELD
Specific Trait: Grain yield per hectare
Citation: CROP SCI (1998) 38: 1296-1308
Chromosome: 1
Flanking Markers(s):
QTL: ZM-GYHA-1-3
Species: Zea mays
General Trait: YIELD
Specific Trait: Grain yield per hectare
Citation: CROP SCI (1998) 38: 1296-1308
Chromosome: 1
Flanking Markers(s):
QTL: ZM-GYHA-1-4
Species: Zea mays
General Trait: YIELD
Specific Trait: Grain yield per hectare
Citation: CROP SCI (1998) 38: 1296-1308
Chromosome: 1
Flanking Markers(s):
QTL: ZM-GYHA-3-1
Species: Zea mays
General Trait: YIELD
Specific Trait: Grain yield per hectare
Citation: CROP SCI (1998) 38: 1296-1308
Chromosome: 3
Flanking Markers(s):
QTL: ZM-GYHA-5-1
Species: Zea mays
General Trait: YIELD
Specific Trait: Grain yield per hectare
Citation: CROP SCI (1998) 38: 1296-1308
Chromosome: 5
Flanking Markers(s):
QTL: ZM-GYHA-6-1
Species: Zea mays
General Trait: YIELD
Specific Trait: Grain yield per hectare
Citation: CROP SCI (1998) 38: 1296-1308
Chromosome: 6
Flanking Markers(s):
QTL: ZM-GYHA-8-1
Species: Zea mays
General Trait: YIELD
Specific Trait: Grain yield per hectare
Citation: CROP SCI (1998) 38: 1296-1308
Chromosome: 8
Flanking Markers(s):
QTL: ZM-GYLD-1-1
Species: Zea mays
General Trait: YIELD
Specific Trait: Grain yield
Citation: CROP SCI (2000) 40: 30-39
Chromosome: 1
Flanking Markers(s):
QTL: ZM-GYLD-1-2
Species: Zea mays
General Trait: YIELD
Specific Trait: Grain yield
Citation: CROP SCI (2000) 40: 30-39
Chromosome: 1
Flanking Markers(s):
QTL: ZM-GYLD-2-1
Species: Zea mays
General Trait: YIELD
Specific Trait: Grain yield
Citation: PLANT BREEDING (1998) 117: 193-202
Chromosome: 2
Flanking Markers(s): “CDOCMT202, CSU75C”
QTL: ZM-GYLD-2-2
Species: Zea mays
General Trait: YIELD
Specific Trait: Grain yield
Citation: CROP SCI (2000) 40: 30-39
Chromosome: 2
Flanking Markers(s):
QTL: ZM-GYLD-2-3
Species: Zea mays
General Trait: YIELD
Specific Trait: Grain yield
Citation: CROP SCI (2000) 40: 30-39
Chromosome: 2
Flanking Markers(s):
QTL: ZM-GYLD-2-4
Species: Zea mays
General Trait: YIELD
Specific Trait: Grain yield
Citation: CROP SCI (2000) 40: 30-39
Chromosome: 2
Flanking Markers(s):
QTL: ZM-GYLD-3-3
Species: Zea mays
General Trait: YIELD
Specific Trait: Grain yield
Citation: CROP SCI (2000) 40: 30-39
Chromosome: 3
Flanking Markers(s):
QTL: ZM-GYLD-4-1
Species: Zea mays
General Trait: YIELD
Specific Trait: Grain yield
Citation: CROP SCI (2000) 40: 30-39
Chromosome: 4
Flanking Markers(s):
QTL: ZM-GYLD-5-1
Species: Zea mays
General Trait: YIELD
Specific Trait: Grain yield
Citation: CROP SCI (2000) 40: 30-39
Chromosome: 5
Flanking Markers(s):
QTL: ZM-GYLD-5-2
Species: Zea mays
General Trait: YIELD
Specific Trait: Grain yield
Citation: CROP SCI (2000) 40: 30-39
Chromosome: 5
Flanking Markers(s):
QTL: ZM-GYLD-5-3
Species: Zea mays
General Trait: YIELD
Specific Trait: Grain yield
Citation: CROP SCI (2000) 40: 30-39
Chromosome: 5
Flanking Markers(s):
QTL: ZM-GYLD-6-1
Species: Zea mays
General Trait: YIELD
Specific Trait: Grain yield
Citation: PLANT BREEDING (1998) 117: 193-202
Chromosome: 6
Flanking Markers(s): “CSU70, CDO580B”
QTL: ZM-GYLD-6-2
Species: Zea mays
General Trait: YIELD
Specific Trait: Grain yield
Citation: CROP SCI (2000) 40: 30-39
Chromosome: 6
Flanking Markers(s):
QTL: ZM-GYLD-6-3
Species: Zea mays
General Trait: YIELD
Specific Trait: Grain yield
Citation: CROP SCI (2000) 40: 30-39
Chromosome: 6
Flanking Markers(s):
QTL: ZM-GYLD-6-4
Species: Zea mays
General Trait: YIELD
Specific Trait: Grain yield
Citation: CROP SCI (2000) 40: 30-39
Chromosome: 6
Flanking Markers(s):
QTL: ZM-GYLD-7-3
Species: Zea mays
General Trait: YIELD
Specific Trait: Grain yield
Citation: CROP SCI (2000) 40: 30-39
Chromosome: 7
Flanking Markers(s):
QTL: ZM-GYLD-8-2
Species: Zea mays
General Trait: YIELD
Specific Trait: Grain yield
Citation: CROP SCI (2000) 40: 30-39
Chromosome: 8
Flanking Markers(s):
QTL: ZM-GYLD-9-1
Species: Zea mays
General Trait: YIELD
Specific Trait: Grain yield
Citation: CROP SCI (2000) 40: 30-39
Chromosome: 9
Flanking Markers(s):
QTL: ZM-GYLD-9-2
Species: Zea mays
General Trait: YIELD
Specific Trait: Grain yield
Citation: CROP SCI (2000) 40: 30-39
Chromosome: 9
Flanking Markers(s):
QTL: ZM-GYUI-9-1
Species: Zea mays
General Trait: YIELD
Specific Trait: Yield under corn borer infestation
Citation: THEOR APPL GENET (2000) 101: 907-917
Chromosome: 9
Flanking Markers(s):
QTL: ZM-GYUI-9-2
Species: Zea mays
General Trait: YIELD
Specific Trait: Yield under corn borer infestation
Citation: THEOR APPL GENET (2000) 101: 907-917
Chromosome: 9
Flanking Markers(s):
QTL: ZM-GYUP-1-1
Species: Zea mays
General Trait: YIELD
Specific Trait: Yield under corn borer protection
Citation: THEOR APPL GENET (2000) 101: 907-917
Chromosome: 1
Flanking Markers(s):
QTL: ZM-GYUP-1-2
Species: Zea mays
General Trait: YIELD
Specific Trait: Yield under corn borer protection
Citation: THEOR APPL GENET (2000) 101: 907-917
Chromosome: 1
Flanking Markers(s):
QTL: ZM-GYUP-9-1
Species: Zea mays
General Trait: YIELD
Specific Trait: Yield under corn borer protection
Citation: THEOR APPL GENET (2000) 101: 907-917
Chromosome: 9
Flanking Markers(s):
QTL: ZM-GYUP-9-2
Species: Zea mays
General Trait: YIELD
Specific Trait: Yield under corn borer protection
Citation: THEOR APPL GENET (2000) 101: 907-917
Chromosome: 9
Flanking Markers(s):
QTL: ZM-HI-1-1
Species: Zea mays
General Trait: YIELD
Specific Trait: Harvest index
Citation: THEOR APPL GENET (1999) 99: 1106-1119
Chromosome: 1
Flanking Markers(s): “UMC94, UMC76”
QTL: ZM-HI-1-2
Species: Zea mays
General Trait: YIELD
Specific Trait: Harvest index
Citation: THEOR APPL GENET (1999) 99: 1106-1119
Chromosome: 1
Flanking Markers(s): “UMC163, UMC161”
QTL: ZM-HI-10-1
Species: Zea mays
General Trait: YIELD
Specific Trait: Harvest index
Citation: THEOR APPL GENET (1999) 99: 1106-1119
Chromosome: 10
Flanking Markers(s): “UMC146, UMC44”
QTL: ZM-HI-3-1
Species: Zea mays
General Trait: YIELD
Specific Trait: Harvest index
Citation: THEOR APPL GENET (1999) 99: 1106-1119
Chromosome: 3
Flanking Markers(s): “UMC92, UMC10”
QTL: ZM-HI-4-1
Species: Zea mays
General Trait: YIELD
Specific Trait: Harvest index
Citation: THEOR APPL GENET (1999) 99: 1106-1119
Chromosome: 4
Flanking Markers(s): “UMC28.1, UMC19”
QTL: ZM-HI-7-1
Species: Zea mays
General Trait: YIELD
Specific Trait: Harvest index
Citation: THEOR APPL GENET (1999) 99: 1106-1119
Chromosome: 7
Flanking Markers(s): “BNL15.40, UMC116”
QTL: ZM-HI-8-1
Species: Zea mays
General Trait: YIELD
Specific Trait: Harvest index
Citation: THEOR APPL GENET (1999) 99: 1106-1119
Chromosome: 8
Flanking Markers(s): “UMC138L, UMC12”
QTL: ZM-ID-10-1
Species: Zea mays
General Trait: QUALITY
Specific Trait: In vitro digestibility of organic stover
Citation: THEOR APPL GENET (2000) 101: 907-917
Chromosome: 10
Flanking Markers(s):
QTL: ZM-ID-2-1
Species: Zea mays
General Trait: QUALITY
Specific Trait: In vitro digestibility of organic stover
Citation: THEOR APPL GENET (2000) 101: 907-917
Chromosome: 2
Flanking Markers(s):
QTL: ZM-ID-5-1
Species: Zea mays
General Trait: QUALITY
Specific Trait: In vitro digestibility of organic stover
Citation: THEOR APPL GENET (2000) 101: 907-917
Chromosome: 5
Flanking Markers(s):
QTL: ZM-ID-5-2
Species: Zea mays
General Trait: QUALITY
Specific Trait: In vitro digestibility of organic stover
Citation: THEOR APPL GENET (2000) 101: 907-917
Chromosome: 5
Flanking Markers(s):
QTL: ZM-ID-8-1
Species: Zea mays
General Trait: QUALITY
Specific Trait: In vitro digestibility of organic stover
Citation: THEOR APPL GENET (2000) 101: 907-917
Chromosome: 8
Flanking Markers(s):
QTL: ZM-IVDOM-1-1
Species: Zea mays
General Trait: QUALITY
Specific Trait: In vitro digestible organic matter
Citation: CROP SCI (1998) 38: 1278-1289
Chromosome: 1
Flanking Markers(s): UMC76
QTL: ZM-IVDOM-1-2
Species: Zea mays
General Trait: QUALITY
Specific Trait: In vitro digestible organic matter
Citation: CROP SCI (1998) 38: 1278-1289
Chromosome: 1
Flanking Markers(s): UMC58
QTL: ZM-IVDOM-1-3
Species: Zea mays
General Trait: QUALITY
Specific Trait: In vitro digestible organic matter
Citation: CROP SCI (1998) 38: 1278-1289
Chromosome: 1
Flanking Markers(s): UMC167
QTL: ZM-IVDOM-1-4
Species: Zea mays
General Trait: QUALITY
Specific Trait: In vitro digestible organic matter
Citation: CROP SCI (1998) 38: 1278-1289
Chromosome: 1
Flanking Markers(s): UMC37
QTL: ZM-IVDOM-10-1
Species: Zea mays
General Trait: QUALITY
Specific Trait: In vitro digestible organic matter
Citation: CROP SCI (1998) 38: 1278-1289
Chromosome: 10
Flanking Markers(s): UMC130
QTL: ZM-IVDOM-10-2
Species: Zea mays
General Trait: QUALITY
Specific Trait: In vitro digestible organic matter
Citation: CROP SCI (1998) 38: 1278-1289
Chromosome: 10
Flanking Markers(s): UMC18
QTL: ZM-IVDOM-3-1
Species: Zea mays
General Trait: QUALITY
Specific Trait: In vitro digestible organic matter
Citation: CROP SCI (1998) 38: 1278-1289
Chromosome: 3
Flanking Markers(s): UMC97
QTL: ZM-IVDOM-3-3
Species: Zea mays
General Trait: QUALITY
Specific Trait: In vitro digestible organic matter
Citation: CROP SCI (1998) 38: 1278-1289
Chromosome: 3
Flanking Markers(s): UMC97
QTL: ZM-IVDOM-5-1
Species: Zea mays
General Trait: QUALITY
Specific Trait: In vitro digestible organic matter
Citation: CROP SCI (1998) 38: 1278-1289
Chromosome: 5
Flanking Markers(s): UMC43
QTL: ZM-IVDOM-5-2
Species: Zea mays
General Trait: QUALITY
Specific Trait: In vitro digestible organic matter
Citation: CROP SCI (1998) 38: 1278-1289
Chromosome: 5
Flanking Markers(s): BNL7.71
QTL: ZM-IVDOM-5-3
Species: Zea mays
General Trait: QUALITY
Specific Trait In vitro digestible organic matter
Citation: CROP SCI (1998) 38: 1278-1289
Chromosome: 5
Flanking Markers(s): UMC90
QTL: ZM-IVDOM-9-1
Species: Zea mays
General Trait: QUALITY
Specific Trait: In vitro digestible organic matter
Citation: CROP SCI (1998) 38: 1278-1289
Chromosome: 9
Flanking Markers(s): BNL5.09
QTL: ZM-IVDOM-9-2
Species: Zea mays
General Trait: QUALITY
Specific Trait: In vitro digestible organic matter
Citation: CROP SCI (1998) 38: 1278-1289
Chromosome: 9
Flanking Markers(s): BNL14.28
QTL: ZM-KNE-4-1
Species: Zea mays
General Trait: YIELD
Specific Trait: Kernel number per ear
Citation: THEOR APPL GENET (1999) 99: 280-288
Chromosome: 4
Flanking Markers(s): PHI093
QTL: ZM-KW100-1-2
Species: Zea mays
General Trait: YIELD
Specific Trait: Kernel weight per 100 kernels
Citation: THEOR APPL GENET (1999) 99: 1106-1119
Chromosome: 1
Flanking Markers(s): “UMC157, BNL8.29”
QTL: ZM-KW100-3-1
Species: Zea mays
General Trait: YIELD
Specific Trait: Kernel weight per 100 kernels
Citation: THEOR APPL GENET (1999) 99: 1106-1119
Chromosome: 3
Flanking Markers(s): UMC60
QTL: ZM-KW100-9-1
Species: Zea mays
General Trait: YIELD
Specific Trait: Kernel weight per 100 kernels
Citation: THEOR APPL GENET (1999) 99: 1106-1119
Chromosome: 9
Flanking Markers(s): “UMC153, BNL5.09”
QTL: ZM-KW300-1-2
Species: Zea mays
General Trait: YIELD
Specific Trait: Kernel weight per 300 kernels
Citation: CROP SCI (1998) 38: 1296-1308
Chromosome: 1
Flanking Markers(s):
QTL: ZM-KW300-3-2
Species: Zea mays
General Trait: YIELD
Specific Trait: Kernel weight per 300 kernels
Citation: CROP SCI (1998) 38: 1296-1308
Chromosome: 3
Flanking Markers(s):
QTL: ZM-KW300-3-3
Species: Zea mays
General Trait: YIELD
Specific Trait: Kernel weight per 300 kernels
Citation: CROP SCI (1998) 38: 1296-1308
Chromosome: 3
Flanking Markers(s):
QTL: ZM-KW300-4-2
Species: Zea mays
General Trait: YIELD
Specific Trait: Kernel weight per 300 kernels
Citation: CROP SCI (1998) 38: 1296-1308
Chromosome: 4
Flanking Markers(s):
QTL: ZM-KW300-5-1
Species: Zea mays
General Trait: YIELD
Specific Trait: Kernel weight per 300 kernels
Citation: CROP SCI (1998) 38: 1296-1308
Chromosome: 5
Flanking Markers(s):
QTL: ZM-KW300-6-2
Species: Zea mays
General Trait: YIELD
Specific Trait: Kernel weight per 300 kernels
Citation: CROP SCI (1998) 38: 1296-1308
Chromosome: 6
Flanking Markers(s):
QTL: ZM-KW300-8-2
Species: Zea mays
General Trait: YIELD
Specific Trait: Kernel weight per 300 kernels
Citation: CROP SCI (1998) 38: 1296-1308
Chromosome: 8
Flanking Markers(s):
QTL: ZM-KW300-9-1
Species: Zea mays
General Trait: YIELD
Specific Trait: Kernel weight per 300 kernels
Citation: CROP SCI (1998) 38: 1296-1308
Chromosome: 9
Flanking Markers(s):
QTL: ZM-KW300-9-2
Species: Zea mays
General Trait: YIELD
Specific Trait: Kernel weight per 300 kernels
Citation: CROP SCI (1998) 38: 1296-1308
Chromosome: 9
Flanking Markers(s):
QTL: ZM-KWE-4-1
Species: Zea mays
General Trait: YIELD
Specific Trait: Kernel weight per ear
Citation: THEOR APPL GENET (1999) 99: 280-288
Chromosome: 4
Flanking Markers(s): PHI093
QTL: ZM-MOIST-1-1
Species: Zea mays
General Trait: QUALITY
Specific Trait: Grain moisture
Citation: CROP SCI (2000) 40: 30-39
Chromosome: 1
Flanking Markers(s):
QTL: ZM-MOIST-1-2
Species: Zea mays
General Trait: QUALITY
Specific Trait: Grain moisture
Citation: CROP SCI (2000) 40: 30-39
Chromosome: 1
Flanking Markers(s):
QTL: ZM-MOIST-1-3
Species: Zea mays
General Trait: QUALITY
Specific Trait: Grain moisture
Citation: CROP SCI (2000) 40: 30-39
Chromosome: 1
Flanking Markers(s):
QTL: ZM-MOIST-1-4
Species: Zea mays
General Trait: QUALITY
Specific Trait: Grain moisture
Citation: CROP SCI (2000) 40: 30-39
Chromosome: 1
Flanking Markers(s):
QTL: ZM-MOIST-1-5
Species: Zea mays
General Trait: QUALITY
Specific Trait: Grain moisture
Citation: CROP SCI (2000) 40: 30-39
Chromosome: 1
Flanking Markers(s):
QTL: ZM-MOIST-1-6
Species: Zea mays
Genera) Trait: QUALITY
Specific Trait: Grain moisture
Citation: CROP SCI (2000) 40: 30-39
Chromosome: 1
Flanking Markers(s):
QTL: ZM-MOIST-10-1
Species: Zea mays
General Trait: QUALITY
Specific Trait: Grain moisture
Citation: CROP SCI (2000) 40: 30-39
Chromosome: 10
Flanking Markers(s):
QTL: ZM-MOIST-2-1
Species: Zea mays
General Trait: QUALITY
Specific Trait: Grain moisture
Citation: CROP SCI (2000) 40: 30-39
Chromosome: 2
Flanking Markers(s):
QTL: ZM-MOIST-2-2
Species: Zea mays
General Trait: QUALITY
Specific Trait: Grain moisture
Citation: CROP SCI (2000) 40: 30-39
Chromosome: 2
Flanking Markers(s):
QTL: ZM-MOIST-2-3
Species: Zea mays
General Trait: QUALITY
Specific Trait: Grain moisture
Citation: CROP SCI (2000) 40: 30-39
Chromosome: 2
Flanking Markers(s):
QTL: ZM-MOIST-3-2
Species: Zea mays
General Trait: QUALITY
Specific Trait: Grain moisture
Citation: CROP SCI (2000) 40: 30-39
Chromosome: 3
Flanking Markers(s):
QTL: ZM-MOIST-3-3
Species: Zea mays
General Trait: QUALITY
Specific Trait: Grain moisture
Citation: CROP SCI (2000) 40: 30-39
Chromosome: 3
Flanking Markers(s):
QTL: ZM-MOIST-4-2
Species: Zea mays
General Trait: QUALITY
Specific Trait: Grain moisture
Citation: CROP SCI (2000) 40: 30-39
Chromosome: 4
Flanking Markers(s):
QTL: ZM-MOIST-4-3
Species: Zea mays
General Trait: QUALITY
Specific Trait: Grain moisture
Citation: CROP SCI (2000) 40: 30-39
Chromosome: 4
Flanking Markers(s):
QTL: ZM-MOIST-4-4
Species: Zea mays
General Trait: QUALITY
Specific Trait: Grain moisture
Citation: CROP SCI (2000) 40: 30-39
Chromosome: 4
Flanking Markers(s):
QTL: ZM-MOIST-5-1
Species: Zea mays
General Trait: QUALITY
Specific Trait: Grain moisture
Citation: CROP SCI (2000) 40: 30-39
Chromosome: 5
Flanking Markers(s):
QTL: ZM-MOIST-5-2
Species: Zea mays
General Trait: QUALITY
Specific Trait: Grain moisture
Citation: CROP SCI (2000) 40: 30-39
Chromosome: 5
Flanking Markers(s):
QTL: ZM-MOIST-5-3
Species: Zea mays
General Trait: QUALITY
Specific Trait: Grain moisture
Citation: CROP SCI (2000) 40: 30-39
Chromosome: 5
Flanking Markers(s):
QTL: ZM-MOIST-5-4
Species: Zea mays
General Trait: QUALITY
Specific Trait: Grain moisture
Citation: CROP SCI (2000) 40: 30-39
Chromosome: 5
Flanking Markers(s):
QTL: ZM-MOIST-6-2
Species: Zea mays
General Trait: QUALITY
Specific Trait: Grain moisture
Citation: CROP SCI (2000) 40: 30-39
Chromosome: 6
Flanking Markers(s):
QTL: ZM-MOIST-7-1
Species: Zea mays
General Trait: QUALITY
Specific Trait: Grain moisture
Citation: CROP SCI (2000) 40: 30-39
Chromosome: 7
Flanking Markers(s):
QTL: ZM-MOIST-7-2
Species: Zea mays
General Trait: QUALITY
Specific Trait: Grain moisture
Citation: CROP SCI (2000) 40: 30-39
Chromosome: 7
Flanking Markers(s):
QTL: ZM-MOIST-7-3
Species: Zea mays
General Trait: QUALITY
Specific Trait: Grain moisture
Citation: CROP SCI (2000) 40: 30-39
Chromosome: 7
Flanking Markers(s):
QTL: ZM-MOIST-7-4
Species: Zea mays
General Trait: QUALITY
Specific Trait: Grain moisture
Citation: CROP SCI (2000) 40: 30-39
Chromosome: 7
Flanking Markers(s):
QTL: ZM-MOIST-8-1
Species: Zea mays
General Trait: QUALITY
Specific Trait: Grain moisture
Citation: CROP SCI (2000) 40: 30-39
Chromosome: 8
Flanking Markers(s):
QTL: ZM-MOIST-8-2
Species: Zea mays
General Trait: QUALITY
Specific Trait: Grain moisture
Citation: CROP SCI (2000) 40: 30-39
Chromosome: 8
Flanking Markers(s):
QTL: ZM-MOIST-9-2
Species: Zea mays
General Trait: QUALITY
Specific Trait: Grain moisture
Citation: CROP SCI (2000) 40: 30-39
Chromosome: 9
Flanking Markers(s):
QTL: ZM-MOIST-9-3
Species: Zea mays
General Trait: QUALITY
Specific Trait: Grain moisture
Citation: CROP SCI (2000) 40: 30-39
Chromosome: 9
Flanking Markers(s):
QTL: ZM-PC-1-1
Species: Zea mays
General Trait: QUALITY
Specific Trait: Protein concentration
Citation: CROP SCI (1998) 38: 1062-1072
Chromosome: 1
Flanking Markers(s): “CSU92, CSUCMT11B”
QTL: ZM-PC-1-2
Species: Zea mays
General Trait: QUALITY
Specific Trait: Protein concentration
Citation: CROP SCI (1998) 38: 1062-1072
Chromosome: 1
Flanking Markers(s): “BNL8.29A, BNL6.32”
QTL: ZM-PC-5-1
Species: Zea mays
General Trait: QUALITY
Specific Trait: Protein concentration
Citation: CROP SCI (1998) 38: 1062-1072
Chromosome: 5
Flanking Markers(s): “UMC51A, UMC127B”
QTL: ZM-PC-8-1
Species: Zea mays
General Trait: QUALITY
Specific Trait: Protein concentration
Citation: CROP SCI (1998) 38: 1062-1072
Chromosome: 8
Flanking Markers(s): “CSU75D, CDO580A”
QTL: ZM-PC-9-1
Species: Zea mays
General Trait: QUALITY
Specific Trait: Protein concentration
Citation: CROP SCI (1998) 38: 1062-1072
Chromosome: 9
Flanking Markers(s): “CSU158, CSU147”
QTL: ZM-PR-9-1
Species: Zea mays
General Trait: QUALITY
Specific Trait: Protein content
Citation: THEOR APPL GENET (2001) 102: 591-599
Chromosome: 9
Flanking Markers(s):
QTL: ZM-STC-10-1
Species: Zea mays
General Trait: QUALITY
Specific Trait: Starch concentration
Citation: CROP SCI (1998) 38: 1278-1289
Chromosome: 10
Flanking Markers(s): UMC146
QTL: ZM-STC-10-2
Species: Zea mays
General Trait: QUALITY
Specific Trait: Starch concentration
Citation: CROP SCI (1998) 38: 1278-1289
Chromosome: 10
Flanking Markers(s): UMC18
QTL: ZM-STC-2-2
Species: Zea mays
General Trait: QUALITY
Specific Trait: Starch concentration
Citation: CROP SCI (1998) 38: 1278-1289
Chromosome: 2
Flanking Markers(s): UMC36
QTL: ZM-STC-5-1
Species: Zea mays
General Trait: QUALITY
Specific Trait: Starch concentration
Citation: CROP SCI (1998) 38: 1278-1289
Chromosome: 5
Flanking Markers(s): BNL5.40
QTL: ZM-STC-5-1
Species: Zea mays
General Trait: QUALITY
Specific Trait: Starch content
Citation: CROP SCI (2001) 41: 690-697
Chromosome: 5
Flanking Markers(s): 60
QTL: ZM-STC-6-1
Species: Zea mays
General Trait: QUALITY
Specific Trait: Starch concentration
Citation: CROP SCI (1998) 38: 1278-1289
Chromosome: 6
Flanking Markers(s): UMC46
QTL: ZM-STC-7-2
Species: Zea mays
General Trait: QUALITY
Specific Trait: Starch concentration
Citation: CROP SCI (1998) 38: 1278-1289
Chromosome: 7
Flanking Markers(s): UMC110
QTL: ZM-STC-8-1
Species: Zea mays
General Trait: QUALITY
Specific Trait: Starch concentration
Citation: CROP SCI (1998) 38: 1278-1289
Chromosome: 8
Flanking Markers(s): UMC124
QTL: ZM-STC-8-1
Species: Zea mays
General Trait: QUALITY
Specific Trait: Starch content
Citation: CROP SCI (2001) 41: 690-697
Chromosome: 8
Flanking Markers(s): 54
QTL: ZM-TGW-4-1
Species: Zea mays
General Trait: YIELD
Specific Trait: Thousand grain weight
Citation: THEOR APPL GENET (2001) 102: 591-599
Chromosome: 4
Flanking Markers(s):
QTL: ZM-TGW-9-1
Species: Zea mays
General Trait: YIELD
Specific Trait: Thousand grain weight
Citation: THEOR APPL GENET (2001) 102: 591-599
Chromosome: 9
Flanking Markers(s):
QTL: ZM-TGW-9-2
Species: Zea mays
General Trait: YIELD
Specific Trait: Thousand grain weight
Citation: THEOR APPL GENET (2001) 102: 591-599
Chromosome: 9
Flanking Markers(s):
QTL: ZM-TW-1-1
Species: Zea mays
General Trait: YIELD
Specific Trait: Test weight
Citation: THEOR APPL GENET (2001) 102: 230-243
Chromosome: 1
Flanking Markers(s):
QTL: ZM-TW-10-2
Species: Zea mays
General Trait: YIELD
Specific Trait: Test weight
Citation: THEOR APPL GENET (2001) 102: 230-243
Chromosome: 10
Flanking Markers(s):
QTL: ZM-TW-2-3
Species: Zea mays
General Trait: YIELD
Specific Trait: Test weight
Citation: THEOR APPL GENET (2001) 102: 230-243
Chromosome: 2
Flanking Markers(s):
QTL: ZM-TW-5-1
Species: Zea mays
General Trait: YIELD
Specific Trait Test weight
Citation: THEOR APPL GENET (2001) 102: 230-243
Chromosome: 5
Flanking Markers(s):
QTL: ZM-TW-8-1
Species: Zea mays
General Trait: YIELD
Specific Trait: Test weight
Citation: THEOR APPL GENET (2001) 102: 230-243
Chromosome: 8
Flanking Markers(s):
QTL: ZM-TW-9-1
Species: Zea mays
General Trait: YIELD
Specific Trait: Test weight
Citation: THEOR APPL GENET (2001) 102: 230-243
Chromosome: 9
Flanking Markers(s):
QTL: ZM-VT-6-1
Species: Zea mays
General Trait: QUALITY
Specific Trait: Vitreousness
Citation: THEOR APPL GENET (2001) 102: 591-599
Chromosome: 6
Flanking Markers(s):
QTL: ZM-YLD-1-1
Species: Zea mays
General Trait: YIELD
Specific Trait: Grain yield
Citation: THEOR APPL GENET (2001) 102: 230-243
Chromosome: 1
Flanking Markers(s):
QTL: ZM-YLD-2-1
Species: Zea mays
General Trait: YIELD
Specific Trait: Grain yield
Citation: THEOR APPL GENET (2001) 102: 230-243
Chromosome: 2
Flanking Markers(s):
QTL: ZM-YLD-2-2
Species: Zea mays
General Trait: YIELD
Specific Trait: Grain yield
Citation: THEOR APPL GENET (2001) 102: 230-243
Chromosome: 2
Flanking Markers(s):
QTL: ZM-YLD-4-1
Species: Zea mays
General Trait: YIELD
Specific Trait: Grain yield
Citation: THEOR APPL GENET (2001) 102: 230-243
Chromosome: 4
Flanking Markers(s):
QTL: ZM-YLD-6-1
Species: Zea mays
General Trait: YIELD
Specific Trait: Grain yield
Citation: THEOR APPL GENET (2001) 102: 230-243
Chromosome: 6
Flanking Markers(s):
QTL: ZM-YLD-9-1
Species: Zea mays
General Trait: YIELD
Specific Trait: Grain yield
Citation: THEOR APPL GENET (2001) 102: 230-243
Chromosome: 9
Flanking Markers(s):

[0841] TABLE 15
Swiss-Prot Data

| | | | | |
|---|---|---|---|---|
| 101 | Accession: | Swissprot_id: | Gi_number: | Description: BETA-AMYLASE |
| | P10538 | AMYB_SOYBN | 231541 | (1,4-ALPHA-D-GLUCAN MALTOHYDROLASE) |
| 113 | Accession: | Swissprot_id: | Gi_number: | Description: Alpha-glucosidase II |
| | Q9F234 | AGL2_BACTQ | 14423647 | |
| 1 | Accession: | Swissprot_id: | Gi_number: | Description: MPV17 protein |
| | P39210 | MPV1_HUMAN | 730059 | |
| 317 | Accession: | Swissprot_id: | Gi_number: | Description: Myb protein |
| | Q08759 | MYB_XENLA | 730090 | |
| 329 | Accession: | Swissprot_id: | Gi_number: | Description: MATERNAL PUMILIO |
| | P25822 | PUM_DROME | 131605 | PROTEIN |
| 173 | Accession: | Swissprot_id: | Gi_number: | Description: Glucose-6-phosphate |
| | P42862 | G6PA_ORYSA | 1169797 | isomerase, cytosolic A (GPI-A) |
| | | | | (Phosphoglucose isomerase A) (PGI-A) |
| | | | | (Phosphohexose isomerase A) (PHI-A) |
| 333 | Accession: | Swissprot_id: | Gi_number: | Description: ACTIN 1 |
| | P02582 | ACT1_MAIZE | 113220 | |
| 233 | Accession: | Swissprot_id: | Gi_number: | Description: GLYCOPROTEIN X |
| | P28968 | VGLX_HSVEB | 138350 | PRECURSOR |
| 335 | Accession: | Swissprot_id: | Gi_number: | Description: DEVELOPMENTAL PROTEIN |
| | Q05201 | EYA_DROME | 544271 | EYES ABSENT (PROTEIN CLIFT) |
| 119 | Accession: | Swissprot_id: | Gi_number: | Description: Sucrose synthase 2 |
| | O24301 | SUS2_PEA | 3915037 | (Sucrose-UDP glucosyltransferase 2) |
| 311 | Accession: | Swissprot_id: | Gi_number: | Description: Anthocyanin regulatory |
| | P10290 | MYBC_MAIZE | 127585 | C1 protein |
| 149 | Accession: | Swissprot_id: | Gi_number: | Description: FRUCTOSE-BISPHOSPHATE |
| | P17784 | ALF_ORYSA | 113622 | ALDOLASE, CYTOPLASMIC ISOZYME |
| 155 | Accession: | Swissprot_id: | Gi_number: | Description: FRUCTOSE-BISPHOSPHATE |
| | Q40677 | ALFC_ORYSA | 3913018 | ALDOLASE, CHLOROPLAST PRECURSOR (ALDP) |
| 143 | Accession: | Swissprot_id: | Gi_number: | Description: Triosephosphate isomerase, |
| | P46225 | TPIC_SECCE | 1174745 | chloroplast precursor (TIM) |
| 307 | Accession: | Swissprot_id: | Gi_number: | Description: G-box binding factor 4 |
| | P42777 | GBF4_ARATH | 1169863 | |
| 341 | Accession: | Swissprot_id: | Gi_number: | Description: DNA-DIRECTED RNA |
| | P16356 | RPB1_CAEEL | 133322 | POLYMERASE II LARGEST SUBUNIT |
| 193 | Accession: | Swissprot_id: | Gi_number: | Description: MYRISTOYLATED ALANINE-RICH |
| | P12624 | MACS_BOVIN | 585447 | C-KINASE SUBSTRATE (MARCKS) (ACAMP-81) |
| 131 | Accession: | Swissprot_id: | Gi_number: | Description: Soluble glycogen |
| | Q43846 | UGS4_SOLTU | 2833389 | [starch] synthase, chloroplast |
| | | | | precursor (SS III) |
| 199 | Accession: | Swissprot_id: | Gi_number: | Description: GLUCOAMYLASE |
| | P08640 | AMYH_YEAST | 728850 | S1/S2 PRECURSOR (GLUCAN 1,4-ALPHA- |
| | | | | GLUCOSIDASE) (1,4-ALPHA-D-GLUCAN |
| | | | | GLUCOHYDROLASE) |
| 343 | Accession: | Swissprot_id: | Gi_number: | Description: Transacting transcriptional |
| | P28284 | ICP0_HSV2H | 124135 | protein ICP0 (VMW118 protein) |
| 287 | Accession: | Swissprot_id: | Gi_number: | Description: Cell cycle control |
| | O59800 | CWF5_SCHPO | 18202094 | protein cwf5 |
| 191 | Accession: | Swissprot_id: | Gi_number: | Description: Endo-1,3; 1,4-beta-D- |
| | Q9ZT66 | E134_MAIZE | 8928122 | glucanase precursor |
| 215 | Accession: | Swissprot_id: | Gi_number: | Description: GLUTELIN |
| | P07730 | GLU2_ORYSA | 121475 | TYPE II PRECURSOR |
| 23 | Accession: | Swissprot_id: | Gi_number: | Description: Speckle-type |
| | O43791 | SPOP_HUMAN | 8134708 | POZ protein |
| 147 | Accession: | Swissprot_id: | Gi_number: | Description: Triosephosphate |
| | P48494 | TPIS_ORYSA | 1351270 | isomerase, cytosolic (TIM) |
| 347 | Accession: | Swissprot_id: | Gi_number: | Description: FRUCTOKINASE |
| | P37829 | SCRK_SOLTU | 585973 | |
| 157 | Accession: | Swissprot_id: | Gi_number: | Description: Phosphoglycolate |
| | P32662 | GPH_ECOLI | 418445 | phosphatase (PGP) |
| 349 | Accession: | Swissprot_id: | Gi_number: | Description: CALPHOTIN |
| | Q02910 | CPN_DROME | 416833 | |
| 139 | Accession: | Swissprot_id: | Gi_number: | Description: Glucose-1-phosphate |
| | P12299 | GLG2_WHEAT | 1707930 | adenylyltransferase large subunit, |
| | | | | chloroplast precursor (ADP-glucose |
| | | | | synthase) (ADP-glucose |
| | | | | pyrophosphorylase) (AGPASE S) |
| | | | | (Alpha-D-glucose-1-phosphate adenyl |
| | | | | transferase) |
| 175 | Accession: | Swissprot_id: | Gi_number: | Description: Triose phosphate/phosphate |
| | P52178 | CPT2_BRAOL | 1706110 | translocator, non-green plastid, |
| | | | | chloroplast precursor (CTPT) |
| 5 | Accession: | Swissprot_id: | Gi_number: | Description: Peroxidase P7 |
| | P00434 | PERX_BRARA | 464365 | |
| 351 | Accession: | Swissprot_id: | Gi_number: | Description: ZINC FINGER PROTEIN |
| | P38682 | GLO3_YEAST | 729595 | GLO3 |
| 353 | Accession: | Swissprot_id: | Gi_number: | Description: FRUCTOKINASE |
| | P37829 | SCRK_SOLTU | 585973 | |
| 255 | Accession: | Swissprot_id: | Gi_number: | Description: MUCIN 2 PRECURSOR |
| | Q02817 | MUC2_HUMAN | 2506877 | |
| | | | | (INTESTINAL MUCIN 2) |
| 75 | Accession: | Swissprot_id: | Gi_number: | Description: Pullulanase precursor |
| | P07206 | PULA_KLEPN | 131589 | (Alpha-dextrin endo-1,6-alpha- |
| | | | | glucosidase) (Pullulan 6- |
| | | | | glucanohydrolase) |
| 357 | Accession: | Swissprot_id: | Gi_number: | Description: IMMEDIATE-EARLY |
| | P33479 | IE18_PRVKA | 462387 | PROTEIN IE 180 |
| 359 | Accession: | Swissprot_id: | Gi_number: | Description: LINE-1 |
| | P08547 | LIN1_HUMAN | 126295 | REVERSE TRANSCRIPTASE HOMOLOG |
| 361 | Accession: | Swissprot_id: | Gi_number: | Description: EBNA-1 NUCLEAR |
| | P03211 | EBN1_EBV | 119110 | PROTEIN |
| 363 | Accession: | Swissprot_id: | Gi_number: | Description: MUCIN 2 PRECURSOR |
| | Q02817 | MUC2_HUMAN | 2506877 | (INTESTINAL MUCIN 2) |
| 365 | Accession: | Swissprot_id: | Gi_number: | Description: LINE-1 REVERSE |
| | P08548 | LIN1_NYCCO | 126296 | TRANSCRIPTASE HOMOLOG |
| 181 | Accession: | Swissprot_id: | Gi_number: | Description: PYROPHOSPHATE--FRUCTOSE |
| | Q41140 | PFPA_RICCO | 2499488 | 6-PHOSPHATE 1-PHOSPHOTRANSFERASE |
| | | | | ALPHA SUBUNIT (PFP) (6-PHOS- |
| | | | | PHOFRUCTOKINASE (PYROPHOSPHATE)) |
| | | | | (PYROPHOSPHATE-DEPENDENT 6- |
| | | | | PHOSPHOFRUCTOSE-1-KINASE) (PPI-PFK) |
| 367 | Accession: | Swissprot_id: | Gi_number: | Description: RETINAL DEGENERATION B |
| | P43125 | RDGB_DROME | 1172875 | PROTEIN (PROBABLE CALCIUM |
| | | | | TRANSPORTER RDGB) |
| 261 | Accession: | Swissprot_id: | Gi_number: | Description: 3-DEOXY-MANNO- |
| | Q59320 | KDSB_CHLTR | 7387818 | OCTULOSONATE CYTIDYLYLTRANSFERASE |
| | | | | (CMP-KDO SYNTHETASE) (CMP-2-KETO-3- |
| | | | | DEOXYOCTULOSONIC ACID SYNTHETASE) (CKS) |
| 221 | Accession: | Swissprot_id: | Gi_number: | Description: CYSTATHIONINE GAMMA- |
| | P55217 | METB_ARATH | 2507422 | SYNTHASE, CHLOROPLAST PRECURSOR |
| | | | | (CGS) (O-SUCCINYLHOMOSERINE (THIOL)- |
| | | | | LYASE) |
| 57 | Accession: | Swissprot_id: | Gi_number: | Description: ARABINOSE-PROTON |
| | P09830 | ARAE_ECOLI | 114102 | SYMPORTER (ARABINOSE TRANSPORTER) |
| 25 | Accession: | Swissprot_id: | Gi_number: | Description: RECEPTOR PROTEIN |
| | Q9SYQ8 | CLV1_ARATH | 12643323 | KINASE CLAVATA1 PRECURSOR |
| 369 | Accession: | Swissprot_id: | Gi_number: | Description: REGULATORY PROTEIN E2 |
| | P06921 | VE2_HPV05 | 1352839 | |
| 39 | Accession: | Swissprot_id: | Gi_number: | Description: LEUCINE-RICH REPEAT |
| | Q9UQ13 | SHO2_HUMAN | 14423936 | PROTEIN SHOC-2 (RAS-BINDING PROTEIN |
| | | | | SUR-8) |
| 87 | Accession: | Swissprot_id: | Gi_number: | Description: Alpha-amylase isozyme |
| | P27935 | AM2A_ORYSA | 113678 | 2A precursor (1,4-alpha-D-glucan |
| | | | | glucanohydrolase) |
| 371 | Accession: | Swissprot_id: | Gi_number: | Description: EARLY NODULIN 93 |
| | Q02921 | NO93_SOYBN | 730165 | (N-93) |
| 163 | Accession: | Swissprot_id: | Gi_number: | Description: Triose phosphate/phosphate |
| | P52178 | CPT2_BRAOL | 1706110 | translocator, non-green plastid, |
| | | | | chloroplast precursor (CTPT) |
| 375 | Accession: | Swissprot_id: | Gi_number: | Description: BEM46 PROTEIN |
| | P54069 | BE46_SCHPO | 12644312 | |
| 315 | Accession: | Swissprot_id: | Gi_number: | Description: Myb-related protein |
| | P20025 | MYB3_MAIZE | 127582 | Zm38 |
| 89 | Accession: | Swissprot_id: | Gi_number: | Description: ALPHA-AMYLASE ISOZYME |
| | P27934 | AM3E_ORYSA | 113683 | 3E PRECURSOR (1,4-ALPHA-D-GLUCAN |
| | | | | GLUCANOHYDROLASE) |
| 289 | Accession: | Swissprot_id: | Gi_number: | Description: ASPARTATE AMINOTRANSFERASE, |
| | P37833 | AATC_ORYSA | 584706 | CYTOPLASMIC (TRANSAMINASE A) |
| 49 | Accession: | Swissprot_id: | Gi_number: | Description: SUGAR CARRIER |
| | Q41144 | STC_RICCO | 3915039 | PROTEIN C |
| 153 | Accession: | Swissprot_id: | Gi_number: | Description: TRIOSE PHOSPHATE/ |
| | P21727 | CPTR_PEA | 117290 | PHOSPHATE TRANSLOCATOR, CHLOROPLAST |
| | | | | PRECURSOR (CTPT) (P36) (E30) |
| 81 | Accession: | Swissprot_id: | Gi_number: | Description: ALPHA-AMYLASE |
| | P17654 | AMY1_ORYSA | 113766 | PRECURSOR (1,4-ALPHA-D-GLUCAN |
| | | | | GLUCANOHYDROLASE) (ISOZYME 1B) |
| 379 | Accession: | Swissprot_id: | Gi_number: | Description: WISKOTT-ALDRICH |
| | O43516 | WAIP_HUMAN | 13124642 | SYNDROME PROTEIN INTERACTING |
| | | | | PROTEIN (WASP INTERACTING PROTEIN) |
| | | | | (PRPL-2 PROTEIN) |
| 305 | Accession: | Swissprot_id: | Gi_number: | Description: TRANSCRIPTIONAL |
| | Q02516 | HAP5_YEAST | 2493550 | ACTIVATOR HAP5 |
| 381 | Accession: | Swissprot_id: | Gi_number: | Description: Retrovirus-related |
| | P10978 | POLX_TOBAC | 130582 | Pol polyprotein from transposon |
| | | | | TNT 1-94 [Contains: Protease; |
| | | | | Reverse transcriptase; Endonuclease] |
| 197 | Accession: | Swissprot_id: | Gi_number: | Description: Alpha-amylase/trypsin |
| | P01087 | IAAT_ELECO | 2851515 | inhibitor (RBI) (RATI) |
| 45 | Accession: | Swissprot_id: | Gi_number: | Description: Organic cation/ |
| | O76082 | OCN2_HUMAN | 8928257 | carnitine transporter 2 (Solute |
| | | | | carrier family 22, member 5) |
| | | | | (High-affinity sodium-dependent |
| | | | | carnitine cotransporter) |
| 97 | Accession: | Swissprot_id: | Gi_number: | Description: SEED ALLERGENIC |
| | Q01885 | RAG2_ORYSA | 548671 | PROTEIN RAG2 PRECURSOR |
| 383 | Accession: | Swissprot_id: | Gi_number: | Description: RING FINGER PROTEIN |
| | Q9WTV7 | RNFB_MOUSE | 13124535 | 12 (LIM DOMAIN INTERACTING RING |
| | | | | FINGER PROTEIN) (RING FINGER LIM |
| | | | | DOMAIN-BINDING PROTEIN) (R-LIM) |
| 135 | Accession: | Swissprot_id: | Gi_number: | Description: Glucose-1-phosphate |
| | P55241 | GLG1_MAIZE | 1707924 | adenylyltransferase large subunit 1, |
| | | | | chloroplast precursor (ADP-glucose |
| | | | | synthase) (ADP-glucose |
| | | | | pyrophosphorylase) (AGPASE S) |
| | | | | (Alpha-D-glucose-1-phosphate adenyl |
| | | | | transferase) (Shrunken-2) |
| 267 | Accession: | Swissprot_id: | Gi_number: | Description: PROLINE-RICH |
| | P05143 | PRP3_MOUSE | 131002 | PROTEIN MP-3 |
| 385 | Accession: | Swissprot_id: | Gi_number: | Description: CYSTEINE PROTEINASE |
| | Q10993 | CYTB_HELAN | 1706277 | INHIBITOR B (CYSTATIN B) (SCB) |
| 283 | Accession: | Swissprot_id: | Gi_number: | Description: Glycine-rich RNA- |
| | P49311 | GRP2_SINAL | 1346181 | binding protein GRP2A |
| 53 | Accession: | Swissprot_id: | Gi_number: | Description: CATION TRANSPORT |
| | P39163 | CHAC_ECOLI | 12644253 | PROTEIN CHAC |
| 253 | Accession: | Swissprot_id: | Gi_number: | Description: Tetraacyldisaccharide |
| | Q9KQX0 | LPXK_VIBCH | 14423750 | 4′-kinase (Lipid A 4′-kinase) |
| 295- | Accession: | Swissprot_id: | Gi_number: | Description: S-adenosylmethionine: |
| | Q9I2W7 | MENG_PSEAE | 17369015 | 2-demethylmenaquinone methyl- |
| | | | | transferase |
| 389 | Accession: | Swissprot_id: | Gi_number: | Description: Extensin precursor |
| | P13983 | EXTN_TOBAC | 119714 | (Cell wall hydroxyproline-rich |
| | | | | glycoprotein) |
| 225 | Accession: | Swissprot_id: | Gi_number: | Description: GLUTELIN PRECURSOR |
| | P14323 | GLU4_ORYSA | 121476 | |
| 391 | Accession: | Swissprot_id: | Gi_number: | Description: GAMMA-GLIADIN |
| | P08453 | GDB2_WHEAT | 121101 | PRECURSOR |
| 167 | Accession: | Swissprot_id: | Gi_number: | Description: Fructose-2,6- |
| | P32604 | F26_YEAST | 1169587 | bisphosphatase |
| 137 | Accession: | Swissprot_id: | Gi_number: | Description: Glucose-1-phosphate |
| | P55238 | GLGS_HORVU | 1707940 | adenylyltransferase small subunit, |
| | | | | chloroplast precursor (ADP-glucose |
| | | | | synthase) (ADP-glucose |
| | | | | pyrophosphorylase) (AGPASE B) |
| | | | | (Alpha-D-glucose-1-phosphate adenyl |
| | | | | transferase) |
| 195 | Accession: | Swissprot_id: | Gi_number: | Description: MUCIN 2 PRECURSOR |
| | Q02817 | MUC2_HUMAN | 2506877 | (INTESTINAL MUCIN 2) |
| 263 | Accession: | Swissprot_id: | Gi_number: | Description: ACYL-COA-BINDING |
| | O22643 | ACBP_FRIAG | 5902717 | PROTEIN (ACBP) |
| 223 | Accession: | Swissprot_id: | Gi_number: | Description: GLUTELIN TYPE I |
| | P07728 | GU11_ORYSA | 121469 | PRECURSOR (CLONE PREE 61) |
| 85 | Accession: | Swissprot_id: | Gi_number: | Description: ALPHA-AMYLASE ISOZYME |
| | P27937 | AM3B_ORYSA | 113680 | 3B PRECURSOR (1,4-ALPHA-D-GLUCAN |
| | | | | GLUCANOHYDROLASE) |
| 129 | Accession: | Swissprot_id: | Gi_number: | Description: Glycogen [starch] |
| | Q43093 | UGS3_PEA | 2833384 | synthase, chloroplast precursor |
| | | | | (GBSSII) (Granule-bound starch |
| | | | | synthase II) |
| 103 | Accession: | Swissprot_id: | Gi_number: | Description: BETA-AMYLASE (1,4- |
| | P93594 | AMYB_WHEAT | 3334120 | ALPHA-D-GLUCAN MALTOHYDROLASE) |
| 51 | Accession: | Swissprot_id: | Gi_number: | Description: Peptide transporter |
| | P46032 | PT2B_ARATH | 1172704 | PTR2-B (Histidine transporting |
| | | | | protein) |
| 99 | Accession: | Swissprot_id: | Gi_number: | Description: SEED ALLERGENIC |
| | Q01885 | RAG2_ORYSA | 548671 | PROTEIN RAG2 PRECURSOR |
| 69 | Accession: | Swissprot_id: | Gi_number: | Description: 1,4-ALPHA-GLUCAN |
| | Q01401 | GLGB_ORYSA | 399544 | BRANCHING ENZYME (STARCH BRANCHING |
| | | | | ENZYME) (Q-ENZYME) |
| 229 | Accession: | Swissprot_id: | Gi_number: | Description: GLUTELIN TYPE II |
| | P07730 | GLU2_ORYSA | 121475 | PRECURSOR |
| 241 | Accession: | Swissprot_id: | Gi_number: | Description: 10 KD PROLAMIN |
| | P15839 | PRO1_ORYSA | 130946 | PRECURSOR |
| 91 | Accession: | Swissprot_id: | Gi_number: | Description: ALPHA-AMYLASE PRECURSOR |
| | P17654 | AMY1_ORYSA | 113766 | (1,4-ALPHA-D-GLUCAN GLUCANOHYDROLASE) |
| | | | | (ISOZYME 1B) |
| 401 | Accession: | Swissprot_id: | Gi_number: | Description: GLUTELIN PRECURSOR |
| | P14323 | GLU4_ORYSA | 121476 | |
| 121 | Accession: | Swissprot_id: | Gi_number: | Description: Sucrose synthase 2 |
| | P31924 | SUS2_ORYSA | 401140 | (Sucrose-UDP glucosyltransferase 2) |
| 403 | Accession: | Swissprot_id: | Gi_number: | Description: Mago |
| | O65806 | MGN_EUPLA | 6016561 | nashi protein homolog |
| 187 | Accession: | Swissprot_id: | Gi_number: | Description: FRUCTOSE-1,6- |
| | O64422 | F16P_ORYSA | 3913641 | BISPHOSPHATASE, CHLOROPLAST |
| | | | | PRECURSOR (D-FRUCTOSE-1,6- |
| | | | | BISPHOSPHATE 1-PHOSPHOHYDROLASE) |
| | | | | (FBPASE) |
| 13 | Accession: | Swissprot_id: | Gi_number: | Description: Blue copper protein |
| | Q41001 | BCP_PEA | 2493318 | precursor |
| 243 | Accession: | Swissprot_id: | Gi_number: | Description: PROLAMIN PPROL 17 |
| | P20698 | PRO7_ORYSA | 130959 | PRECURSOR |
| 203 | Accession: | Swissprot_id: | Gi_number: | Description: Glycogen operon |
| | Q10767 | GLGX_MYCTU | 1707945 | protein glgX homolog |
| 407 | Accession: | Swissprot_id: | Gi_number: | Description: Vegetatible |
| | Q00808 | HET1_PODAN | 3023956 | incompatibility protein HET-E-1 |
| 409 | Accession: | Swissprot_id: | Gi_number: | Description: O-METHYLTRANSFERASE |
| | P47917 | ZRP4_MAIZE | 1353193 | ZRP4 (OMT) |
| 411 | Accession: | Swissprot_id: | Gi_number: | Description: GLUCOAMYLASE |
| | P08640 | AMYH_YEAST | 728850 | S1/S2 PRECURSOR (GLUCAN 1,4-ALPHA- |
| | | | | GLUCOSIDASE) (1,4-ALPHA-D-GLUCAN |
| | | | | GLUCOHYDROLASE) |
| 105 | Accession: | Swissprot_id: | Gi_number: | Description: BETA-AMYLASE (1,4- |
| | P55005 | AMYB_MAIZE | 1703302 | ALPHA-D-GLUCAN MALTOHYDROLASE) |
| 107 | Accession: | Swissprot_id: | Gi_number: | Description: BETA-AMYLASE (1,4- |
| | P10538 | AMYB_SOYBN | 231541 | ALPHA-D-GLUCAN MALTOHYDROLASE) |
| 115 | Accession: | Swissprot_id: | Gi_number: | Description: ALPHA-GLUCOSIDASE |
| | Q43763 | AGLU_HORVU | 3023275 | PRECURSOR (MALTASE) |
| 15 | Accession: | Swissprot_id: | Gi_number: | Description: DnaJ homolog subfamily |
| | P25685 | DJB1_HUMAN | 1706473 | B member 1 (Heat shock 40 kDa |
| | | | | protein 1) (Heat shock protein 40) |
| | | | | (HSP40) (DnaJ protein homolog 1) |
| | | | | (HDJ-1) |
| 165 | Accession: | Swissprot_id: | Gi_number: | Description: Alpha-1,4 glucan |
| | P27598 | PHSL_IPOBA | 130172 | phosphorylase, L isozyme, |
| | | | | chloroplast precursor (Starch |
| | | | | phosphorylase L) |
| 123 | Accession: | Swissprot_id: | Gi_number: | Description: Sucrose synthase 3 |
| | Q43009 | SUS3_ORYSA | 3915054 | (Sucrose-UDP glucosyltransferase 3) |
| 205 | Accession: | Swissprot_id: | Gi_number: | Description: MUCIN 2 PRECURSOR |
| | Q02817 | MUC2_HUMAN | 2506877 | (INTESTINAL MUCIN 2) |
| 413 | Accession: | Swissprot_id: | Gi_number: | Description: ANTER-SPECIFIC PROLINE- |
| | P40603 | APG_BRANA | 728868 | RICH PROTEIN APG (PROTEIN CEX) |
| 209 | Accession: | Swissprot_id: | Gi_number: | Description: ANTHOCYANIN REGULATORY |
| | P13526 | ARLC_MAIZE | 114156 | LC PROTEIN |
| 323 | Accession: | Swissprot_id: | Gi_number: | Description: Wiskott-Aldrich syndrome |
| | P70315 | WASP_MOUSE | 2499130 | protein homolog (WASP) |
| 415 | Accession: | Swissprot_id: | Gi_number: | Description: SPIDROIN 1 |
| | P19837 | SPD1_NEPCL | 1174414 | (DRAGLINE SILK FIBROIN 1) |
| 141 | Accession: | Swissprot_id: | Gi_number: | Description: Glucose-1-phosphate |
| | P55238 | GLGS_HORVU | 1707940 | adenylyltransferase small subunit, |
| | | | | chloroplast precursor (ADP-glucose |
| | | | | synthase) (ADP-glucose |
| | | | | pyrophosphorylase)(AGPASE B) |
| | | | | (Alpha-D-glucose-1-phosphate adenyl |
| | | | | transferase) |
| 27 | Accession: | Swissprot_id: | Gi_number: | Description: Carbon catabolite |
| | Q02723 | RKI1_SECCE | 400982 | derepressing protein kinase |
| 65 | Accession: | Swissprot_id: | Gi_number: | Description: PHOSPHATE-REPRESSIBLE |
| | P15710 | PHO4_NEUCR | 130117 | PHOSPHATE PERMEASE |
| 185 | Accession: | Swissprot_id: | Gi_number: | Description: PYROPHOSPHATE-- |
| | Q41140 | PFPA_RICCO | 2499488 | FRUCTOSE 6-PHOSPHATE 1- |
| | | | | PHOSPHOTRANSFERASE ALPHA SUBUNIT |
| | | | | (PFP) (6-PHOSPHOFRUCTOKINASE |
| | | | | (PYROPHOSPHATE)) (PYROPHOSPHATE- |
| | | | | DEPENDENT 6-PHOSPHOFRUCTOSE-1- |
| | | | | KINASE) (PPI-PFK) |
| 299 | Accession: | Swissprot_id: | Gi_number: | Description: Heterogeneous nuclear |
| | P09651 | ROA1_HUMAN | 133254 | ribonucleoprotein A1 (Helix- |
| | | | | destabilizing protein) (Single- |
| | | | | strand binding protein) (hnRNP |
| | | | | core protein A1) |
| 67 | Accession: | Swissprot_id: | Gi_number: | Description: Peptide transporter |
| | P46032 | PT2B_ARATH | 1172704 | PTR2-B (Histidine transporting |
| | | | | protein) |
| 17 | Accession: | Swissprot_id: | Gi_number: | Description: Stromal 70 kDa heat |
| | Q02028 | HS7S_PEA | 399942 | shock-related protein, chloroplast |
| | | | | precursor |
| 279 | Accession: | Swissprot_id: | Gi_number: | Description: Probable |
| | P38994 | MSS4_YEAST | 1709144 | phosphatidylinositol-4-phosphate 5- |
| | | | | kinase MSS4 (1-phosphatidylinositol- |
| | | | | 4-phosphate kinase) (PIP5K) |
| | | | | (PtdIns(4)P-5-kinase) |
| | | | | (Diphosphoinositide kinase) |
| 71 | Accession: | Swissprot_id: | Gi_number: | Description: 1,4-alpha-glucan |
| | Q08047 | GLGB_MAIZE | 1169911 | branching enzyme IIB, chloroplast |
| | | | | precursor (Starch branching enzyme |
| | | | | IIB) (Q-enzyme) |
| 207 | Accession: | Swissprot_id: | Gi_number: | Description: Indole-3-glycerol |
| | P49572 | TRPC_ARATH | 1351303 | phosphate synthase, chloroplast |
| | | | | precursor (IGPS) |
| 417 | Accession: | Swissprot_id: | Gi_number: | Description: Transacting tran- |
| | P28284 | ICP0_HSV2H | 124135 | scriptional protein ICP0 (VMW118 |
| | | | | protein) |
| 127 | Accession: | Swissprot_id: | Gi_number: | Description: Sucrose synthase 2 |
| | O24301 | SUS2_PEA | 3915037 | (Sucrose-UDP glucosyltransferase 2) |
| 125 | Accession: | Swissprot_id: | Gi_number: | Description: Sucrose synthase 2 |
| | O24301 | SUS2_PEA | 3915037 | (Sucrose-UDP glucosyltransferase 2) |
| 183 | Accession: | Swissprot_id: | Gi_number: | Description: Pyrophosphate-- |
| | Q59126 | PFP_AMYME | 3122594 | fructose 6-phosphate 1-phospho- |
| | | | | transferase (6-phosphofructokinase |
| | | | | (Pyrophosphate)) (Pyrophosphate- |
| | | | | dependent 6-phosphofructose-1- |
| | | | | kinase) (PPI-PFK) |
| 419 | Accession: | Swissprot_id: | Gi_number: | Description: GLUTELIN TYPE-B |
| | Q02897 | GLUC_ORYSA | 544400 | 2 PRECURSOR |
| 421 | Accession: | Swissprot_id: | Gi_number: | Description: Goliath protein |
| | Q06003 | GOLI_DROME | 462193 | (G1 protein) |
| 29 | Accession: | Swissprot_id: | Gi_number: | Description: Calcium-dependent |
| | P53682 | CDP1_ORYSA | 1705733 | protein kinase, isoform 1 (CDPK 1) |
| 297 | Accession: | Swissprot_id: | Gi_number: | Description: MATERNAL PUMILIO |
| | P25822 | PUM_DROME | 131605 | PROTEIN |
| 245 | Accession: | Swissprot_id: | Gi_number: | Description: IMMUNOGLOBULIN A1 |
| | P45386 | IGA4_HAEIN | 1170517 | PROTEASE PRECURSOR (IGA1 PROTEASE) |
| 427 | Accession: | Swissprot_id: | Gi_number: | Description: RETROTRANSPOSABLE |
| | Q05654 | RDPO_SCHPO | 1710054 | ELEMENT TF2 155 KDA PROTEIN |
| 159/171 | Accession: | Swissprot_id: | Gi_number: | Description: Glucose-6-phosphate |
| X | P42862 | G6PA_ORYSA | 1169797 | isomerase, cytosolic A (GPI-A) |
| | | | | (Phosphoglucose isomerase A) (PGI-A) |
| | | | | (Phosphohexose isomerase A) (PHI-A) |
| 31 | Accession: | Swissprot_id: | Gi_number: | Description: Peptide transporter |
| | P46032 | PT2B_ARATH | 1172704 | PTR2-B (Histidine transporting |
| | | | | protein) |
| 403/431- | Accession: | Swissprot_id: | Gi_number: | Description: VITELLOGENIN II |
| | P02845 | VIT2_CHICK | 138595 | PRECURSOR (MAJOR VITELLOGENIN) |
| | | | | [CONTAINS: LIPOVITELLIN I |
| | | | | (LVI); PHOSVITIN (PV); LIPOVITELLIN |
| | | | | II (LVII); YGP40] |
| 275 | Accession: | Swissprot_id: | Gi_number: | Description: TRANSCRIPTIONAL |
| | P15276 | ALGP_PSEAE | 13959675 | REGULATORY PROTEIN ALGP (ALGINATE |
| | | | | REGULATORY PROTEIN ALGR3) |
| 19 | Accession: | Swissprot_id: | Gi_number: | Description: Protein phosphatase 2C |
| | O62830 | P2CB_BOVIN | 10720178 | beta isoform (PP2C-beta) |
| 151 | Accession: | Swissprot_id: | Gi_number: | Description: Alpha-glucan phos- |
| | Q9LKJ3 | PHSH_WHEAT | 14916632 | phorylase, H isozyme (Starch |
| | | | | phosphorylase H) |
| 213/227- | Accession: | Swissprot_id: | Gi_number: | Description: 19 KD GLOBULIN |
| | P29835 | GL19_ORYSA | 232161 | PRECURSOR (ALPHA-GLOBULIN) |
| 237 | Accession: | Swissprot_id: | Gi_number: | Description: CALMODULIN |
| | P02595 | CALM_PATSP | 115518 | |
| 133 | Accession: | Swissprot_id: | Gi_number: | Description: Granule-bound glycogen |
| | Q42968 | UGST_ORYGL | 2833382 | [starch] synthase, chloroplast |
| | | | | precursor |
| 239 | Accession: | Swissprot_id: | Gi_number: | Description: GLUTELIN TYPE-A |
| | Q09151 | GLU3_ORYSA | 1707986 | III PRECURSOR |
| 161 | Accession: | Swissprot_id: | Gi_number: | Description: UTP--GLUCOSE-1- |
| | Q43772 | UDPG_HORVU | 6136111 | PHOSPHATE URIDYLYLTRANSFERASE |
| | | | | (UDP-GLUCOSE PYROPHOSPHORYLASE) |
| | | | | (UDPGP) (UGPASE) |
| 61 | Accession: | Swissprot_id: | Gi_number: | Description: Intestinal |
| | P70545 | NDC2_RAT | 2499525 | sodium/dicarboxylate cotransporter |
| | | | | Na(+)/dicarboxylate cotransporter) |
| 47 | Accession: | Swissprot_id: | Gi_number: | Description: INORGANIC PHOSPHATE |
| | P25297 | PH84_YEAST | 1346710 | TRANSPORTER PHO84 |
| 219 | Accession: | Swissprot_id: | Gi_number: | Description: PROLAMIN PPROL 17 |
| | P20698 | PRO7_ORYSA | 130959 | PRECURSOR |
| 435 | Accession: | Swissprot_id: | Gi_number: | Description: SEED ALLERGENIC |
| | Q01881 | RA05_ORYSA | 548657 | PROTEIN RA5 PRECURSOR |
| 259/271- | Accession: | Swissprot_id: | Gi_number: | Description: OLEOSIN 16 KD |
| | Q42980 | OLE1_ORYSA | 3334280 | (OSE701) |
| 93 | Accession: | Swissprot_id: | Gi_number: | Description: PROTEIN KINASE APK1B |
| | P46573 | APKB_ARATH | 12644274 | |
| 441 | Accession: | Swissprot_id: | Gi_number: | Description: Luminal binding protein |
| | Q03685 | BIP5_TOBAC | 729623 | 5 precursor (BiP 5) (78 kDa glucose- |
| | | | | regulated protein homolog 5) |
| | | | | (GRP 78-5) |
| 111 | Accession: | Swissprot_id: | Gi_number: | Description: ATP-binding cassette, |
| | Q99758 | ABC3_HUMAN | 7387524 | subfamily A, member 3 (ATP-binding |
| | | | | cassette transporter 3) (ATP-binding |
| | | | | cassette 3) (ABC-C transporter) |
| 73 | Accession: | Swissprot_id: | Gi_number: | Description: 1,4-alpha-glucan |
| | Q08047 | GLGB_MAIZE | 1169911 | branching enzyme IIB, chloroplast |
| | | | | precursor (Starch branching enzyme |
| | | | | IIB) (Q-enzyme) |
| 443 | Accession: | Swissprot_id: | Gi_number: | Description: Luminal binding protein |
| | Q03685 | BIP5_TOBAC | 729623 | 5 precursor (BiP 5) (78 kDa glucose- |
| | | | | regulated protein homolog 5) |
| | | | | (GRP 78-5) |
| 235 | Accession: | Swissprot_id: | Gi_number: | Description: |
| | P14614 | GLU5_ORYSA | 121477 | GLUTELIN PRECURSOR |
| 217 | Accession: | Swissprot_id: | Gi_number: | Description: 13 KD PROLAMIN PRECURSOR |
| | P17048 | PRO2_ORYSA | 6174927 | |
| 257 | Accession: | Swissprot_id: | Gi_number: | Description: OLEOSIN 18 KD (OSE721) |
| | Q40646 | OLE2_ORYSA | 3334279 | |
| 201 | Accession: | Swissprot_id: | Gi_number: | Description: Receptor-like protein |
| | P47735 | RLK5_ARATH | 1350783 | kinase 5 precursor |
| 445 | Accession: | Swissprot_id: | Gi_number: | Description: SULFATED SURFACE |
| | P21997 | SSGP_VOLCA | 134920 | GLYCOPROTEIN 185 (SSG 185) |
| 281 | Accession: | Swissprot_id: | Gi_number: | Description: SACCHAROPINE |
| | P38999 | LYS9_YEAST | 729968 | DEHYDROGENASE [NADP+, L-GLUTAMATE |
| | | | | FORMING] |
| 251 | Accession: | Swissprot_id: | Gi_number: | Description: Cyclic-nucleotide-gated |
| | Q00195 | CNG2_RAT | 116574 | olfactory channel (Cyclic-nucleotide- |
| | | | | gated cation channel 2) (CNG channel |
| | | | | 2) (CNG2) (CNG-2) (OCNC1) |
| 3 | Accession: | Swissprot_id: | Gi_number: | Description: Receptor-like protein |
| | P47735 | RLK5_ARATH | 1350783 | kinase 5 precursor |
| 447 | Accession: | Swissprot_id: | Gi_number: | Description: Peroxisome assembly |
| | O60683 | PEXA_HUMAN | 3914299 | protein 10 (Peroxin-10) |
| 21 | Accession: | Swissprot_id: | Gi_number: | Description: PROTEIN KINASE APK1B |
| | P46573 | APKB_ARATH | 12644274 | |
| 179 | Accession: | Swissprot_id: | Gi_number: | Description: Prophosphate-- |
| | P21343 | PFPB_SOLTU | 2507174 | fructose 6-phosphate |
| | | | | 1-phosphotransferase beta subunit |
| | | | | (PFP) (6-phosphofructokinase |
| | | | | (Pyrophosphate)) (Pyrophosphate- |
| | | | | dependent 6-phosphofructose-1- |
| | | | | kinase) (PPI-PFK) |
| 319 | Accession: | Swissprot_id: | Gi_number: | Description: GLYCERALDEHYDE |
| | Q64467 | G3PT_MOUSE | 2494630 | 3-PHOSPHATE DEHYDROGENASE, |
| | | | | ESTIS-SPECIFIC (GAPDH) |
| 7 | Accession: | Swissprot_id: | Gi_number: | Description: Probable protease |
| | P20346 | P322_SOLTU | 129350 | inhibitor P322 precursor |
| 291 | Accession: | Swissprot_id: | Gi_number: | Description: Neural Wiskott-Aldrich |
| | O08816 | WASL_RAT | 13431956 | syndrome protein (N-WASP) |
| 169 | Accession: | Swissprot_id: | Gi_number: | Description: UTP--glucose-1-phosphate |
| | O64459 | UDPG_PYRPY | 6136112 | uridylyltransferase (UDP-glucose |
| | | | | pyrophosphorylase) (UDPGP) (UGPase) |
| 83 | Accession: | Swissprot_id: | Gi_number: | Description: ALPHA-AMYLASE ISOZYME |
| | P27933 | AM3D_ORYSA | 113682 | 3D PRECURSOR (1,4-ALPHA-D-GLUCAN |
| | | | | GLUCANOHYDROLASE) |
| 269 | Accession: | Swissprot_id: | Gi_number: | Description: PHOSPHOLIPASE D2 |
| | O14939 | PLD2_HUMAN | 13124441 | (PLD 2) CHOLINE PHOSPHATASE 2) |
| | | | | PHOSPHATIDYLCHOLINE-HYDROLYZING |
| | | | | PHOSPHOLIPASE D2) (PLD1C) |
| 95 | Accession: | Swissprot_id: | Gi_number: | Description: SEED ALLERGEN1C |
| | Q01885 | RAG2_ORYSA | 548671 | PROTEIN RAG2 PRECURSOR |
| 9 | Accession: | Swissprot_id: | Gi_number: | Description: Eukaryotic initiation |
| | Q03387 | IF41_WHEAT | 1170504 | factor (iso)4F subunit P82-34 |
| | | | | (eIF-(iso)4F P82-34) |
| 449 | Accession: | Swissprot_id: | Gi_number: | Description: Palmitoyl-protein |
| | P50897 | PPT_HUMAN | 1709747 | thioesterase precursor (Palmitoyl- |
| | | | | protein hydrolase) |
| 451 | Accession: | Swissprot_id: | Gi_number: | Description: Cell wall protein DAN4 |
| | P47179 | DAN4_YEAST | 1352944 | precursor |
| 277 | Accession: | Swissprot_id: | Gi_number: | Description: MUCIN 2 PRECURSOR |
| | Q02817 | MUC2_HUMAN | 2506877 | (INTESTINAL MUCIN 2) |
| 285 | Accession: | Swissprot_id: | Gi_number: | Description: MATERNAL PUMILIO PROTEIN |
| | P25822 | PUM_DROME | 131605 | |
| 453 | Accession: | Swissprot_id: | Gi_number: | Description: REGULATORY PROTEIN E2 |
| | P06921 | VE2_HPV05 | 1352839 | |
| 265 | Accession: | Swissprot_id: | Gi_number: | Description: ANTER-SPECIFIC PROLINE- |
| | P40602 | APG_ARATH | 728867 | RICH PROTEIN APG PRECURSOR |
| 327 | Accession: | Swissprot_id: | Gi_number: | Description: Myb protein |
| | Q08759 | MYB_XENLA | 730090 | |
| 231 | Accession: | Swissprot_id: | Gi_number: | Description: CALMODULIN-RELATED |
| | P27164 | CAL3_PETHY | 115492 | PROTEIN |
| 37 | Accession: | Swissprot_id: | Gi_number: | Description: Peptide transporter |
| | P46032 | PT2B_ARATH | 1172704 | PTR2-B (Histidine transporting |
| | | | | protein) |
| 455 | Accession: | Swissprot_id: | Gi_number: | Description: VITELLOGENIN II |
| | P02845 | VIT2_CHICK | 138595 | PRECURSOR (MAJOR VITELLOGENIN) |
| | | | | [CONTAINS: LIPOVITELLIN I |
| | | | | (LVI); PHOSVITIN (PV); |
| | | | | LIPOVITELLIN II (LVII); YGP40] |
| 43 | Accession: | Swissprot_id: | Gi_number: | Description: MLO PROTEIN |
| | P93766 | MLO_HORVU | 6016588 | |
| 457 | Accession: | Swissprot_id: | Gi_number: | Description: VACUOLAR PROTEIN |
| | Q07878 | VP13_YEAST | 2499125 | SORTING-ASSOCIATED PROTEIN VPS 13 |
| 459 | Accession: | Swissprot_id: | Gi_number: | Description: Protein-export |
| | Q50634 | SECD_MYCTU | 2498898 | membrane protein secD |
| 293 | Accession: | Swissprot_id: | Gi_number: | Description: Minor extracellular |
| | P29141 | SUBV_BACSU | 135023 | protease VPR precursor |
| 321 | Accession: | Swissprot_id: | Gi_number: | Description: Myb proto-oncogene |
| | P01103 | MYB_CHICK | 127591 | protein (C-myb) |
| 79 | Accession: | Swissprot_id: | Gi_number: | Description: GLUCOAMYLASE |
| | P08640 | AMYH_YEAST | 728850 | S1/S2 PRECURSOR (GLUCAN 1,4-ALPHA- |
| | | | | GLUCOSIDASE) (1,4-ALPHA-D-GLUCAN |
| | | | | GLUCOHYDROLASE) |
| 211 | Accession: | Swissprot_id: | Gi_number: | Description: GAMMA-GLIADIN |
| | P08079 | GDB0_WHEAT | 121099 | PRECURSOR |
| 177 | Accession: | Swissprot_id: | Gi_number: | Description: FRUCTOSE-BISPHOSPHATE |
| | P46256 | ALF1_PEA | 1168408 | ALDOLASE, CYTOPLASMIC ISOZYME 1 |
| 461 | Accession: | Swissprot_id: | Gi_number: | Description: MUCIN 2 PRECURSOR |
| | Q02817 | MUC2_HUMAN | 2506877 | (INTESTINAL MUCIN 2) |

[0842] All publications, patents and patent applications are incorporated herein by reference. While in the foregoing specification this invention has been described in relation to certain preferred embodiments thereof, and many details have been set forth for purposes of illustration, it will be apparent to those skilled in the art that the invention is susceptible to additional embodiments and that certain of the details described herein may be varied considerably without departing from the basic principles of the invention.

1. A polynucleotide comprising a nucleotide sequence encoding a polypeptide the activity of which is involved in or associated with the synthesis, metabolism or degradation of carbohydrates in the plant grain and the expression of which is up-regulated during grain filling, which nucleotide sequence is substantially similar to a sequence encoding a polypeptide as given in SEQ ID NOS: 70-210 or a partial-length polypeptide having substantially the same activity as the full-length polypeptide, e.g., at least 50%, more preferably at least 80%, even more preferably at least 90% to 95% the activity of the full-length polypeptide.

2. The polynucleotide of claim 1 comprising a nucleotide sequence
a) as given in any one of SEQ ID NOs: 69-209 or a part thereof which still encodes a partial-length polypeptide having substantially the same activity as the full-length polypeptide, e.g., at least 50%, more preferably at least 80%, even more preferably at least 90% to 95% the activity of the full-length polypeptide;
b) having substantial similarity to (a);
c) capable of hybridizing to (a) or the complement thereof;
d) capable of hybridizing to a nucleic acid comprising 50 to 200 or more consecutive nucleotides of a nucleotide sequence given in SEQ ID NO: 69-209, or the complement thereof;
e) complementary to (a), (b) or (c); and
f) which is the reverse complement of (a), (b) or (c).

3. A polynucleotide according to claim 1 comprising a nucleotide sequence encoding a polypeptide which is involved in associated with starch biosynthsis and up-regulated during grain filling, which nucleic acid molecule is substantially similar to a nucleic acid encoding a polypeptide as given in SEQ ID NOs: 70-188 or a partial-length polypeptide having substantially the same activity as the full-length polypeptide, e.g., at least 50%, more preferably at least 80%, even more preferably at least 90% to 95% the activity of the full-length polypeptide.

4. The polynucleotide of claim 3 comprising a nucleotide sequence a) as given in any one of the SEQ ID NOs of table 7 such as SEQ ID NOs: 69-187 or a part thereof which still encodes a partial-length polypeptide having substantially the same activity as the full-length polypeptide, e.g., at least 50%, more preferably at least 80%, even more preferably at least 90% to 95% the activity of the full-length polypeptide;
b) having substantial similarity to (a);
c) capable of hybridizing to (a) or the complement thereof;
d) capable of hybridizing to a nucleic acid comprising 50 to 200 or more consecutive nucleotides of a nucleotide sequence given in SEQ ID NOs: 69-187, or the complement thereof;
e) complementary to (a), (b) or (c); and
f) which is the reverse complement of (a), (b) or (c).

5. The polynucleotide of claim 3 comprising a nucleotide sequence encoding a polypeptide with an activity of a small and large subunit ADPG pyrophosphorylase, respectively, which nucleotide sequence is substantially similar to a nucleic acid sequence encoding a polypeptide as given in SEQ ID NOs: 136-142 or a partial-length polypeptide having substantially the same activity as the full-length polypeptide, e.g., at least 50%, more preferably at least 80%, even more preferably at least 90% to 95% the activity of the full-length polypeptide.

6. The polynucleotide of claim 5 comprising a nucleotide sequence
a) as given in any one of SEQ ID NOs: 135-141 or a part thereof which still encodes a partial-length polypeptide having substantially the same activity as the full-length polypeptide, e.g., at least 50%, more preferably at least 80%, even more preferably at least 90% to 95% the activity of the full-length polypeptide;
b) having substantial similarity to (a);
c) capable of hybridizing to (a) or the complement thereof;
d) capable of hybridizing to a nucleic acid comprising 50 to 200 or more consecutive nucleotides of nucleotides given in SEQ ID NO: 135-141, or the complement thereof;
e) complementary to (a), (b) or (c); and
f) which is the reverse complement of (a), (b) or (c).

7. A polynucleotide according to claim 3 comprising a nucleotide sequence encoding a polypeptide involved in starch structure rearrangement, which nucleic acid molecule is substantially similar to a nucleic acid encoding a polypeptide as given in SEQ ID NOs: 76-78 exhibiting isoamylase debranching enzyme activity; 70-74 exhibiting a branching enzyme activity, 80-92 exhibiting an α-amylase activity; 94-100 exhibiting an α-amylase inhibitor activity; 110 exhibiting a pullulanase activity;
102-108 exhibiting a O-amylase activity; 112-118 exhibiting a a-glucosidase activity, or a partial-length polypeptide having substantially the same activity as the full-length polypeptide, e.g., at least 50%, more preferably at least 80%, even more preferably at least 90% to 95% the activity of the full-length polypeptide.

8. The polynucleotide of claim 7, comprising a nucleotide sequence
a) as given in any one of SEQ ID NOs: 75-77 exhibiting isoamylase debranching enzyme activity; 69-73 exhibiting a branching enzyme activity, 79-91 exhibiting an α-amylase activity; 93-99 exhibiting an α-amylase inhibitor activity; 109 exhibiting a pullulanase activity; 101-107, exhibiting a β-amylase activity; 111-117 or a part thereof which still encodes a partial-length polypeptide having substantially the same activity as the full-length polypeptide, e.g., at least 50%, more preferably at least 80%, even more preferably at least 90% to 95% the activity of the full-length polypeptide;
b) having substantial similarity to (a);
c) capable of hybridizing to (a) or the complement thereof;
d) capable of hybridizing to a nucleic acid comprising 50 to 200 or more consecutive nucleotides of a nucleotide sequence given in SEQ ID NOs: 75-77 exhibiting isoamylase debranching enzyme activity; 69-73 exhibiting a branching enzyme activity, 79-91 exhibiting an α-amylase activity; 93-99 exhibiting an α-amylase inhibitor activity; 109 exhibiting a pullulanase activity; 101-107, exhibiting a β-amylase activity; 111-117;
e) complementary to (a), (b) or (c); and
f) which is the reverse complement of (a), (b) or (c).

9. A polynucleotide according to claim 3 comprising a nucleotide sequence encoding a polypeptide exhibiting an amylase or an amylase inhibitor activity, which nucleic acid molecule is substantially similar to a nucleic acid encoding a polypeptide as given in SEQ ID NOs: 80-92 exhibiting an α-amylase activity; and 94-100 exhibiting an α-amylase inhibitor activity, or a partial-length polypeptide having substantially the same activity as the full-length polypeptide, e.g., at least 50%, more preferably at least 80%, even more preferably at least 90% to 95% the activity of the full-length polypeptide.

10. The polynucleotide of claim 9 comprising a nucleotide sequence
a) as given in any one of SEQ ID NOs: 79-91 exhibiting an α-amylase activity; and 93-99 exhibiting an α-amylase inhibitor activity or a part thereof which still encodes a partial-length polypeptide having substantially the same activity as the full-length polypeptide, e.g., at least 50%, more preferably at least 80%, even more preferably at least 90% to 95% the activity of the full-length polypeptide;
b) having substantial similarity to (a);
c) capable of hybridizing to (a) or the complement thereof;
d) capable of hybridizing to a nucleic acid comprising 50 to 200 or more consecutive nucleotides of a nucleotide sequence given in SEQ ED NOs: 79-91 exhibiting an α-amylase activity; and 93-99 exhibiting an α-amylase inhibitor activity, or the complement thereof;
e) complementary to (a), (b) or (c); and
f) which is the reverse complement of (a), (b) or (c).

11. A polynucleotide according to claim 3 comprising a nucleotide sequence encoding a polypeptide exhibiting a sucrose synthase activity, which nucleic acid molecule is substantially similar to a nucleic acid encoding a polypeptide as given in SEQ ID NOs: 120-128 or a partial-length polypeptide having substantially the same activity as the full-length polypeptide, e.g., at least 50%, more preferably at least 80%, even more preferably at least 90% to 95% the activity of the full-length polypeptide.

12. The polynucleotide of claim 11 comprising a nucleotide sequence
a) as given in any one of SEQ ID NOs: 119-127 or a part thereof which still encodes a partial-length polypeptide having substantially the same activity as the full-length polypeptide, e.g., at least 50%, more preferably at least 80%, even more preferably at least 90% to 95% the activity of the full-length polypeptide;
b) having substantial similarity to (a);
c) capable of hybridizing to (a) or the complement thereof;
d) capable of hybridizing to a nucleic acid comprising 50 to 200 or more consecutive nucleotides of a nucleotide sequence given in SEQ ID NOs: 119-127 or the complement thereof;
e) complementary to (a), (b) or (c); and
f) which is the reverse complement of (a), (b) or (c).

13. A polynucleotide according to claim 3 comprising a nucleotide sequence encoding a polypeptide exhibiting a glucanase activity, which nucleic acid molecule is substantially similar to a nucleic acid encoding a polypeptide as given in SEQ ID NOs: 192 or a partial-length polypeptide having substantially the same activity as the full-length polypeptide, e.g., at least 50%, more preferably at least 80%, even more preferably at least 90% to 95% the activity of the full-length polypeptide.

14. The polynucleotide of claim 13 comprising a nucleotide sequence
a) as given in SEQ ID NO: 191 or a part thereof which still encodes a partial-length polypeptide having substantially the same activity as the full-length polypeptide, e.g., at least 50%, more preferably at least 80%, even more preferably at least 90% to 95% the activity of the full-length polypeptide;
b) having substantial similarity to (a);
c) capable of hybridizing to (a) or the complement thereof;
d) capable of hybridizing to a nucleic acid comprising 50 to 200 or more consecutive nucleotides of nucleotides given in SEQ ID NO: 191 or the complement thereof;
e) complementary to (a), (b) or (c); and
f) which is the reverse complement of (a), (b) or (c).

15. A polynucleotide comprising a nucleotide sequence encoding a seed storage protein, which nucleic acid molecule is substantially similar to a nucleic acid encoding a polypeptide as given in SEQ ID NOs: 212-250 or a partial-length polypeptide having substantially the same activity as the full-length polypeptide, e.g., at least 50%, more preferably at least 80%, even more preferably at least 90% to 95% the activity of the full-length polypeptide.

16. The polynucleotide of claim 15 comprising a nucleotide sequence
a) as given in any one of SEQ ID NOs: 211-249 or a part thereof which still encodes a partial-length polypeptide having substantially the same activity as the full-length polypeptide, e.g., at least 50%, more preferably at least 80%, even more preferably at least 90% to 95% the activity of the full-length polypeptide;
b) having substantial similarity to (a);
c) capable of hybridizing to (a) or the complement thereof;
d) capable of hybridizing to a nucleic acid comprising 50 to 200 or more consecutive nucleotides of a nucleotide sequence given in any one of SEQ ID NOs: 211-249 or the complement thereof;
e) complementary to (a), (b) or (c); and
f) which is the reverse complement of (a), (b) or (c).

17. The polynucleotide of claim 15 comprising a nucleotide sequence encoding a glutelin protein the expression of which is up-regulated during grain filling, which nucleic acid molecule is substantially similar to a nucleic acid encoding a polypeptide as given in SEQ ID NOs: 224, 236, and 240 or a partial-length polypeptide having substantially the same activity as the full-length polypeptide, e.g., at least 50%, more preferably at least 80%, even more preferably at least 90% to 95% the activity of the full-length polypeptide.

18. The polynucleotide of claim 17 comprising a nucleotide sequence
a) as given in any one of SEQ ID NOs: 223, 235, and 239 or a part thereof which still encodes a partial-length polypeptide having substantially the same activity as the full-length polypeptide, e.g., at least 50%, more preferably at least 80%, even more preferably at least 90% to 95% the activity of the full-length polypeptide;
b) having substantial similarity to (a);
c) capable of hybridizing to (a) or the complement thereof;
d) capable of hybridizing to a nucleic acid comprising 50 to 200 or more consecutive nucleotides of a nucleotide sequence given in any one of SEQ ID NOs: 223, 235, and 239, or the complement thereof;
e) complementary to (a), (b) or (c); and
f) which is the reverse complement of (a), (b) or (c).

19. A polynucleotide according to claim 15 comprising a nucleotide sequence encoding a prolamin protein the expression of which is up-regulated during grain filling, which nucleotide sequence is substantially similar to a nucleic acid sequence encoding a polypeptide as given in SEQ HD NOs: 218, 220, 226 and 242 or a partial-length polypeptide having substantially the same activity as the full-length polypeptide, e.g., at least 50%, more preferably at least 80%, even more preferably at least 90% to 95% the activity of the full-length polypeptide.

20. The polynucleotide of claim 19 comprising a nucleotide sequence
a) as given in any one of SEQ ID NOs: 217, 219, 225 and 241 or a part thereof which still encodes a partial-length polypeptide having substantially the same activity as the full-length polypeptide, e.g., at least 50%, more preferably at least 80%, even more preferably at least 90% to 95% the activity of the full-length polypeptide;
b) having substantial similarity to (a);
c) capable of hybridizing to (a) or the complement thereof;
d) capable of hybridizing to a nucleic acid comprising 50 to 200 or more consecutive nucleotides of a nucleotide sequence given in any one of SEQ ID NOs: 217, 219, 225 and 241, or the complement thereof;
e) complementary to (a), (b) or (c); and
f) which is the reverse complement of (a), (b) or (c).

21. A polynucleotide according to claim 15 comprising a nucleotide sequence encoding a gliadin protein, the expression of which is up-regulated during grain filling, which nucleotide sequence is substantially similar to a nucleic acid sequence encoding a polypeptide as given in SEQ ID NOs: 212, 219; 234, 248; and 250 or a partial-length polypeptide having substantially the same activity as the full-length polypeptide, e.g., at least 50%, more preferably at least 80%, even more preferably at least 90% to 95% the activity of the full-length polypeptide.

22. The polynucleotide of claim 21 comprising a nucleotide sequence
a) as given in any one of SEQ ID NOs: 211,220; 233, 247; and 249 or a part thereof which still encodes a partial-length polypeptide having substantially the same activity as the full-length polypeptide, e.g., at least 50%, more preferably at least 80%, even more preferably at least 90% to 95% the activity of the full-length polypeptide;
b) having substantial similarity to (a);
c) capable of hybridizing to (a) or the complement thereof;
d) capable of hybridizing to a nucleic acid comprising 50 to 200 or more consecutive nucleotides of a nucleotide sequence given in any one of SEQ ID NOs: 135325; 135133; 10825,135101; and 135103, or the complement thereof;
e) complementary to (a), (b) or (c); and
f) which is the reverse complement of (a), (b) or (c).

23. A polynucleotide the expression of which is up-regulated during grain filling comprising a nucleotide sequence encoding a polypeptide that is involved in or associated with fatty acid synthesis or lipid metabolism, which nucleotide sequence is substantially similar to a nucleic acid sequence encoding a polypeptide as given in SEQ ID NOs: 252-280 or a partial-length polypeptide having substantially the same activity as the full-length polypeptide, e.g., at least 50%, more preferably at least 80%, even more preferably at least 90% to 95% the activity of the full-length polypeptide.

24. The polynucleotide of claim 23 comprising a nucleotide sequence
a) as given in any one of SEQ ID NOs: 251-279 or a part thereof which still encodes a partial-length polypeptide having substantially the same activity as the full-length polypeptide, e.g., at least 50%, more preferably at least 80%, even more preferably at least 90% to 95% the activity of the full-length polypeptide;
b) having substantial similarity to (a);
c) capable of hybridizing to (a) or the complement thereof;
d) capable of hybridizing to a nucleic acid comprising 50 to 200 or more consecutive nucleotides of nucleotides given in any one of SEQ ID NOs: 251-279 or the complement thereof;
e) complementary to (a), (b) or (c); and
f) which is the reverse complement of (a), (b) or (c).

25. A polynucleotide according to claim 23 comprising a nucleotide sequence encoding an oleosin protein, which nucleotide sequence is substantially similar to a nucleic acid sequence encoding a polypeptide as given in SEQ ID NOs: 258 and 260 or a partial-length polypeptide having substantially the same activity as the full-length polypeptide, e.g., at least 50%, more preferably at least 80%, even more preferably at least 90% to 95% the activity of the full-length polypeptide.

26. The polynucleotide of claim 25 comprising a nucleotide sequence
a) as given in any one of SEQ ID NOs: 257 and 259 or a part thereof which still encodes a partial-length polypeptide having substantially the same activity as the full-length polypeptide, e.g., at least 50%, more preferably at least 80%, even more preferably at least 90% to 95% the activity of the full-length polypeptide;
b) having substantial similarity to (a);
c) capable of hybridizing to (a) or the complement thereof;
d) capable of hybridizing to a nucleic acid comprising 50 to 200 or more consecutive nucleotides of a nucleotide sequence given in any one of SEQ ID NOs: 257 and 259, or the complement thereof;
e) complementary to (a), (b) or (c); and
f) which is the reverse complement of (a), (b) or (c).

27. A polynucleotide according to claim 23 comprising a nucleotide sequence encoding a polypeptide the activity of which is involved in or associated with the dehydrogenation of phytoene and the expression of which is up-regulated during grain filling, which nucleotide sequence is substantially similar to a nucleic acid sequence encoding a polypeptide as given in SEQ ID NO: 278 or a partial-length polypeptide having substantially the same activity as the full-length polypeptide, e.g., at least 50%, more preferably at least 80%, even more preferably at least 90% to 95% the activity of the full-length polypeptide.

28. The polynucleotide of claim 27 comprising a nucleotide sequence
a) as given in any one of SEQ ID NOs: 277 or a part thereof which still encodes a partial-length polypeptide having substantially the same activity as the full-length polypeptide, e.g., at least 50%, more preferably at least 80%, even more preferably at least 90% to 95% the activity of the full-length polypeptide;
b) having substantial similarity to (a);
c) capable of hybridizing to (a) or the complement thereof;
d) capable of hybridizing to a nucleic acid comprising 50 to 200 or more consecutive nucleotides of a nucleotide-sequence given in any one of SEQ ID NOs: 277, or the complement thereof;
e) complementary to (a), (b) or (c); and
f) which is the reverse complement of (a), (b) or (c).

29. A polynucleotide comprising a nucleotide sequence that encodes a polypeptide that acts as a transcription factor and the expression of which is up-regulates during grain filling, which nucleotide sequence is substantially similar to a nucleic acid sequence encoding a polypeptide as given in SEQ ID NOs: 302-328 or a partial-length polypeptide having substantially the same activity as the full-length polypeptide, e.g., at least 50%, more preferably at least 80%, even more preferably at least 90% to 95% the activity of the full-length polypeptide.

30. The polynucleotide of claim 29 comprising a nucleotide sequence
a) as given in any one of SEQ ID NOs: 301-327 or a part thereof which still encodes a partial-length polypeptide having substantially the same activity as the full-length polypeptide, e.g., at least 50%, more preferably at least 80%, even more preferably at least 90% to 95% the activity of the full-length polypeptide;
b) having substantial similarity to (a);
c) capable of hybridizing to (a) or the complement thereof;
d) capable of hybridizing to a nucleic acid comprising 50 to 200 or more consecutive nucleotides of a nucleotide sequence given in any one of SEQ ID NOs: 301-327, or the complement thereof;
e) complementary to (a), (b) or (c); and
f) which is the reverse complement of (a), (b) or (c).

31. A polynucleotide comprising a nucleotide sequence encoding a polypeptide the activity of which is involved or associated with the metabolism of amino acids and the expression of which is up-regulated during grain filling, which nucleotide sequence is substantially similar to a nucleic acid sequence encoding a polypeptide as given in SEQ ID NOs: 282-300 or a partial-length polypeptide having substantially the same activity as the full-length polypeptide, e.g., at least 50%, more preferably at least 80%, even more preferably at least 90% to 95% the activity of the full-length polypeptide.

32. The polynucleotide of claim 31 comprising a nucleotide sequence
a) as given in any one of SEQ ID NOs: 281-299 or a part thereof which still encodes a partial-length polypeptide having substantially the same activity as the full-length polypeptide, e.g., at least 50%, more preferably at least 80%, even more preferably at least 90% to 95% the activity of the full-length polypeptide;
b) having substantial similarity to (a);
c) capable of hybridizing to (a) or the complement thereof;
d) capable of hybridizing to a nucleic acid comprising 50 to 200 or more consecutive nucleotides of a nucleotide sequence given in any one of SEQ ID NOs: δ 281-299, or the complement thereof;
e) complementary to (a), (b) or (c); and
f) which is the reverse complement of (a), (b) or (c).

33. A polypeptide which has an amino acid sequence encoded by any one of the polynucleotides according to claim 1.

34. A polypeptide according to claim 33, which has an amino acid sequence encoded by a polynucleotide selected from the group consisting of SEQ ID NOs: 1 to 461, 501-511, and 513-641.

35. A polypeptide according to claim 33 wherein said polypeptide has at least 90% amino acid sequence identity to a polynucleotide selected from the group consisting of SEQ ID NOs: 2-462, 502-512, and 514-642.

36. An isolated nucleic acid molecule comprising a nucleotid sequence, which nucleotide sequence is obtained or obtainable from plant genomic DNA comprising a gene having an open reading frame (ORF) encoding a polypeptide which has at least between 70%, and 99% amino acid sequence identity to a polypeptide encoded by an Oryza, e.g., Oryza saliva, gene comprising a nucleotide sequence as given in SEQ ID NOs: 1 to 461, 501-511, and 513-641.

37. A recombinant vector comprising a polynucleotide of claim 1.

38. An expression cassette comprising as operably linked components, a promoter, a polynucleotide of claim 1 and a termination sequence.

39. A host cell comprising the expression cassette of claim 38.

40. The host cell of claim 39 wherein said host cell is a bacterial cell, a yeast cell, an animal cell or a plant cell.

41. The host cell of claim 40, wherein said plant cell is from a cereal plant.

42. A plant comprising a host cell of claim 39.

43. A plant according to claim 42, wherein said plant is selected from the group consisting of maize, soybean, barley, alfalfa, sunflower, tomato, banana, canola, cotton, peanut, sorghum, tobacco, sugarbeet, wheat, and rice.

44. A method of modulating carbohydrate composition of the plant grain, comprising functionally integrating an isolated nucleic acid molecule according to claim 1 comprising a nucleic acid sequence encoding a polypeptide, which is involved in or associated with the synthesis, metabolism or degradation of carbohydrates in the plant grain and the expression of which is up-regulated during grain filling, into a cell, group of cells, tissue or organ of a plant.

45. A method of modulating the protein content and composition of the plant grain, comprising functionally integrating an isolated nucleic acid molecule according to claim 15 comprising a nucleic acid sequence encoding a polypeptide, which is involved in or associated with the synthesis, metabolism or degradation of seed storage proteins in the plant grain and the expression of which is up-regulated during grain filling, into a cell, group of cells, tissue or organ of a plant.

46. A method of modulating the fatty acid and/or lipid content and composition of the plant grain, comprising functionally integrating an isolated nucleic acid molecule according to claim 23 comprising a nucleic acid sequence encoding a polypeptide, which is involved in or associated with fatty acid synthesis or lipid metabolism in the plant grain and the expression of which is up-regulated during grain filling, into a cell, group of cells, tissue or organ of a plant.

47. A method of modulating the grain filling process of the plant grain, comprising functionally integrating an isolated nucleic acid molecule according to claim 28 comprising a nucleic acid sequence encoding a transcription factor polypeptide, which is involved in or associated with the regulation and coordination of grain filling in plants and the expression of which is up-regulated during grain filling, into a cell, group of cells, tissue or organ of a plant.

48. A method of modulating the amino acid content and composition of the plant grain, comprising functionally integrating an isolated nucleic acid molecule according to claim 31 comprising a nucleic acid sequence encoding a polypeptide the activity of which is involved or associated with the metabolism of amino acids and the expression of which is up-regulated during grain filling, into a cell, group of cells, tissue or organ of a plant.

49. A method of modulating nutrient content and composition of the plant grain, comprising:
a) functionally integrating
i. an isolated nucleic acid molecule according to claim 1, or a portion thereof in an anti-sense orientation; or
ii. an dsRNAi construct comprising an isolated nucleic acid molecule according to claim 1, or a portion thereof in both a sense and an anti-sense orientation, which, optionally, may be separated by a spacer region;
under the transcriptional control of regulatory sequences required for expression in plants, into a cell, group of cells, tissue or organ of a plant; and
b) expressing the constructs as provided in a) above in a cell, group of cells, a tissue or organ of a plant to produce a RNA transcript.

50. A method of identifying or isolating polynucleotide sequences that are orthologous to a nucleic acid molecule according to claim 1 comprising a nucleic acid fragment encoding a polypeptide that is up-regulated during grain filling, from the genome of another plant, wherein all or a portion of a particular nucleic acid sequence according to claim 1 is used as a probe that selectively hybridizes to gene sequences present in a population of cloned genomic DNA fragments or cDNA fragments from a chosen source organism.

51. A method to identify a nucleic acid molecule encoding a polypeptide the expression of which is up-regulated during grain filling
a) contacting a plurality of isolated nucleic acid samples comprising all or a portion of a particular nucleic acid sequence according to claim 1 on a solid substrate with a probe comprising plant nucleic acid corresponding to RNA isolated from a specific plant tissue during grain filling so as to form a complex, wherein each sample comprises a plurality of oligonucleotides corresponding to at least a portion of one plant gene; and
b) contacting a second plurality of isolated nucleic acid samples comprising all or a portion of a particular nucleic acid sequence according to claim 1 to on a solid substrate with a second probe comprising plant nucleic acid corresponding to RNA that is taken at a different development stage of the plant;
c) comparing complex formation in a) with complex formation in b) so as to identify which samples correspond to genes that are expressed during grain filling.

52. A method for detecting the presence of a polynucleotide according to claim 1, or a fragment or a variant thereof, or a complementary sequence thereto in a sample, the method including the following steps of:
a) bringing into contact a nucleotide probe or a plurality of nucleotide probes which can hybridize with a polynucleotide according to claim 1, or a fragment or a variant thereof, or a complementary sequence thereto and the sample to be assayed.
b) detecting the hybrid complex formed between the probe and a nucleotide in the sample.

53. A kit for detecting the presence of a polynucleotide according to claim 1, or a fragment or a variant thereof, or a complementary sequence thereto in a sample, the kit including a nucleotide probe or a plurality of nucleotide probes which can hybridize with a nucleotide sequence comprised within a polynucleotide according to claim 1, or a fragment or a variant thereof, or a complementary sequence thereto and, optionally, the reagents necessary for performing the hybridization reaction.

54. A method of modifying the frequency of a grain filling gene in a plant population, comprising the steps of:
a) screening a plurality of plants using an oligonucleotide as a marker to determine the presence or absence of a grain filling gene in an individual plant, the oligonucleotide consisting of not more than 300 bases of a nucleotide sequence selected from the group consisting of SEQ ID NOs 1 to SEQ ID NO: 461,
b) selecting at least one individual plant for breeding based on the presence or absence of the grain filling gene; and
c) breeding at least one plant thus selected to produce a population of plants having a modified frequency of the grain filling gene.

55. A method according to claim 54, wherein the oligonucleotide comprises a simple sequence repeat (SSR) sequence comprising at least two consecutive repeat units of an SSR, the start and end points of which are provided in Tables 2 and 3, and a flanking sequence of at least about 14 nucleic acids immediately adjacent to said at least two consecutive repeat units.

56. A method of plant breeding to select for or against a trait of interest which is associated with grain filling in plants, comprising the steps of:
a. identifying the trait of interest; identifying at least one oligonucleotide that can be used as a marker for the trait, the oligonucleotide consisting of not more than 300 bases of a nucleotide sequence selected from the group consisting of SEQ ID NOs: 1 to SEQ ID NO: 461,
b. screening at least one plant for the presence of the at least one oligonucleotide;
c. selecting at least one plant based on presence or absence of the at least one oligonucleotide;
d. breeding at least one plant thus selected to produce a population of plants having a modified frequency of the at least one oligonucleotide; and
e. screening at least one plant of the population for the presence or absence of the grain filling trait.

57. A method according to claim 56, wherein the oligonucleotide comprises a simple sequence repeat (SSR) sequence comprising at least two consecutive repeat units of an SSR, the start and end points of which are provided in Tables 2 and 3, and a flanking sequence of at least about 14 nucleic acids immediately adjacent to said at least two consecutive repeat units.

58. A method of determining a varietal identity of a plant, comprising:
a) obtaining a nucleic acid sample from a plant;
b) identifying at least one oligonucleotide to obtain an oligonucleotide profile for the plant, wherein the oligonucleotide consists of not more than 300 bases of a nucleotide sequence selected from the group consisting of SEQ ID NOs: 1 to SEQ ID NO: 461, the oligonucleotide comprising a simple sequence repeat (SSR) sequence comprising at least two consecutive repeat units of an SSR, the start and end points of which are provided in Tables 2 and 3, and a flanking sequence of at least about 14 nucleic acids immediately adjacent to said at least two consecutive repeat units in the sample; and
c) comparing the SSR profile to at least one known SSR profile corresponding to at least one known variety to determine the varietal identity of the plant.

59. An oligonucleotide primer consisting of between 8 and 150 bases which comprises at least 14 bases selected from the group of flanking sequences obtainable from a nucleotide sequence provided in SEQ ID NOs: 3435 to SEQ ID NO: 150133, which at least 14 bases are immediately adjacent to at least two consecutive repeat units of an SSR, the start and end points of which are provided in Tables 2 and 3.

60. A computer-readable medium having stored thereon a data structure comprising:
a) Sequence information of a polynucleotide according to claim 1; 15-22; 23-28; 28-30 and 31 to 32 and/or; and a polynucleotide according to any one of claims . . . to . . . .
b) a module receiving the nucleic acid molecule which compares the nucleic acid sequence of the molecule to at least one other nucleic acid sequence.

The application's sequence listing, which the Patent Office published only in electronic form, follows.

SEQUENCE LISTING (1201 sequences)

SEQ ID NO: 1 - DNA, 605 bp, Oryza sativa
atgcggcggctatggcggtggtaccagcagtgcctggccacccaccccgtgcgcacgcaggtggtcagctccggcatcctctggggcctcggcgacatcggcgcccaggccgtcacccacgataaagagttcaaaattgattggaagagggtgggcatcacaagctcatttggatttgcttttgttggaccagttggacattactgtatgaatacttggatcgcttcatcctgaggagataccagcctaagaccttcaaatttgttgcgtcaaaagttgctgcggatggtctcctatttggaccagtagatcttctcttgttcttctcatatgttggtcttgcatcaggaaggagtgtagagcaggtgaaggatgatgtgaagagggacttcattcctgctctagttctagggggaaccatctggccagccgtgcaaatcgcaaatttccgcttcattcctgtgcgatatcagctcctttacgtgaacctgttctgcctcttagacagttgcttcttgtcgtggatcgatcaacaaggagatgcaccttggaagcaatggttcacatcattccagaaaatcgaaggccagaagggcaaggtttga

SEQ ID NO: 2 - protein, 200 aa, Oryza sativa
MRRLWRWYQQCLATHPVRTQVVSSGILWGLGDIGAQAVTHDKEFKIDWKRVGITSSFGFAFVGPVGHYCEYLDRFILRRYQPKTFKFVASKVAADGLLFGPVDLLLFFSYVGLASGRSVEQVKDDVKRDFIPALVLGGTIWPAVQIANFRFIPVRYQLLYVNLFCLLDSCFLSWIDQQGDAPWKQWFTSFQKIEGQKGKV

SEQ ID NO: 3 - DNA, 2901 bp, Oryza sativa
  misc_feature (1636)..(1636): m = adenine or cytosine
  misc_feature (1641)..(1641): y = cytosine or thymine
  misc_feature (1649)..(1649): y = cytosine or thymine
  misc_feature (1878)..(1878): y = cytosine or thymine
  misc_feature (1884)..(1884): y = cytosine or thymine
atgctcatgcgtcatccgaccatcgccgccgccgccgcctcctccttcctcctcctcatgatcgccgccgatggccaggcggcgacgccgccaccacctgcagccatcggcaactactgcgaaccgcgcgagagagacgcgctgctggcgttcaaggaaggcgtcaccgacgaccctgcaggcctccacgcctcatggcgacgaggtggcggtcagctgcaggaggattgctgccaatggcgaggcgtccggtgcagcaacctcaccggccatgtcgtcaagctccgcctccgcaacgaccacgccggaacagcgctggccggcgagataggccagtctctgatctcgctggagcatctcaggtaccttgatctcagcatgaacaaccttgcaggttccactggacatgtccctgagttcttgggctctttcaaaagcctgagatatctgaatctatctgggatagtgttctccggcatggtgccgcctcagctcggtaacctttcgaacttgcgatatctcgatctttctgggataagattatctggcatggtttcatttctgtacattaatgatggttcatggttaggacacttgtccaatttgcaatatctgaaccttgatggggtaaaccttagcacagtagttgattggtcacatgttctgaacatgatcccttctctgaagattgttagcctttcttcttgctcacttcagagtgcaaaccagtctctcccagagcttagtttcaaggaactcgagaagcttgatctttccaacaatgactttaaccacccagctgaatctagttggatttggaacttgacatctctcaagtatctcaatcttagctcgactagtttgtacggtgatattccgcgagcgctaggaaacatgctgtccctccaagatagcatgcgcatgagcgtgtcgaaaaatggcaatatgggcaccatgaaagcaaacttgaagaatctatgcaatttggaagttctagaccttgattgtaggctagaatatggaaacattacggatatatttcagagtttaccacagtgttcacccagcaaactgaaggaagttcatttggctggcaacactttaaccgggatgctaccaaattggattggaaggctaacaagcttagtcactcttgacctcttcaataatagcattactggacaggtgccttctgaaataggtatgcaaacaaatctgaggaatttgtacctacatttcaataacatgaatggtaccatcacagagaagcactttgcgcacctgacgagcttgaagtcgatatatttgtgttacaatcatttgaacattgtgatggatcctcaatggttacctcccttcaaattagagaagtcttactttgcatctattacgatgggtccctcattttctagatggcttcaatcacaggttgatattgtcgcacttgctatgaatgatgctggcataaatgacacattcccagactggttctctacaacattttcaaaggccaagttgttggaatttcccggtaatcaaatcagtggtggattgccaacaaatatggaaaacatgtcattggaaaaattatatctgaaatcgaaccaaatagcgggtctgattcctcgcatgccgmgaaayctcactayattagatttatcaaacaactcattgtcaggacctctgccattaaatattggatctccaaaactagctgagttgaatctgttatccaaccgtatcaccgggaatgttccacaatctatttgtgaactgcagaatttacatggcctagacttatccaacaatctgcttcatggagagtttcctcaatgttctgggatgagcatgatgtcgttttttcgtctgagtaacaayagcttytctggcaacttcccatcttttcttcagggttggacagagttaagcttccttgatctatcatggaataaattctctgggaatttgcctacatggattggaaatttcagcaagctagaaattctgcggcttaagcataacatgttctctggaaatattcctgccagcatcaccaaacttggaaatctttctcatttggatcttgctagcaatagtatatcaggtcccctgcctcagtatttggcaaatttgacaggaatggttccgaagcaatattatacgaacgagcatgaagagagactatctggatgtgactacaaatctcttgtgaccatgaaggggctggaacttgagtatgatgaagaaaatgtaactgtggtgaccattgatttgtcctcaaatctattgaccggtgtgattcctgaagacattacttatcttcatagattgataaatctgaatctatcgagtaactatttgagtggaaaaattccatattcgatcagggacatgcagtcattggaatcgctcgacctctcgaagaacatgctctatggtgaaatcccacaaagtttgtctgatttatcgtctttaagttttctgaacctatcttataacaatctcatgggaagaataccattagggacacaacttggcaccctctatgaccaaaaccatcatctgtatgatggcaatgatggtctttgtgggcctcctctcccaaaaagctgttataaaagcgatgcatcagagcaaggtcacctgatgagaagtaaacaaggttttgacatagggccattttccattggagttgcaatgggatttatggcaggtctctggattgtcttctatgcccttttgttcatgaaaacttggagggttgcttacttctgtctcttggacaaggtgtatgacgagctacagtacctgaagaaaaatgaaaacagagcatgcagagctgggacagaggttttgcgctgcaaacttcatcagcttttctgggcttatattctcccctaa

SEQ ID NO: 4 - protein, 966 aa, Oryza sativa
  misc_feature (546)..(546): Xaa = any naturally occuring amino acid
  misc_feature (550)..(550): Xaa = any naturally occuring amino acid
MLMRHPTIAAAAASSFLLLMIAADGQAATPPPPAAIGNYCEPRERDALLAFKEGVTDDPAGLHASWRRGGGQLQEDCCQWRGVRCSNLTGHVVKLRLRNDHAGTALAGEIGQSLISLEHLRYLDLSMNNLAGSTGHVPEFLGSFKSLRYLNLSGIVFSGMVPPQLGNLSNLRYLDLSGIRLSGMVSFLYINDGSWLGHLSNLQYLNLDGVNLSTVVDWSHVLNMIPSLKIVSLSSCSLQSANQSLPELSFKELEKLDLSNNDFNHPAESSWIWNLTSLKYLNLSSTSLYGDIPRALGNMLSLQDSMRMSVSKNGNMGTMKANLKNLCNLEVLDLDCRLEYGNITDIFQSLPQCSPSKLKEVHLAGNTLTGMLPNWIGRLTSLVTLDLFNNSITGQVPSEIGMQTNLRNLYLHFNNMNGTITEKHFAHLTSLKSIYLCYNHLNIVMDPQWLPPFKLEKSYFASITMGPSFSRWLQSQVDIVALAMNDAGINDTFPDWFSTTFSKAKLLEFPGNQISGGLPTNMENMSLEKLYLKSNQIAGLIPRMPXNLTXLDLSNNSLSGPLPLNIGSPKLAELNLLSNRITGNVPQSICELQNLHGLDLSNNLLHGEFPQCSGMSMMSFFRLSNNSFSGNFPSFLQGWTELSFLDLSWNKFSGNLPTWIGNFSKLEILRLKHNMFSGNIPASITKLGNLSHLDLASNSISGPLPQYLANLTGMVPKQYYTNEHEERLSGCDYKSLVTMKGLELEYDEENVTVVTIDLSSNLLTGVIPEDITYLHRLINLNLSSNYLSGKIPYSIRDMQSLESLDLSKNMLYGEIPQSLSDLSSLSFLNLSYNNLMGRIPLGTQLGTLYDQNHHLYDGNDGLCGPPLPKSCYKSDASEQGHLMRSKQGFDIGPFSIGVAMGFMAGLWIVFYALLFMKTWRVAYFCLLDKVYDELQYLKKNENRACRAGTEVLRCKLHQLFWAYILP

SEQ ID NO: 5 - DNA, 990 bp, Oryza sativa
  misc_feature (702)..(702): k = guanine or thymine
atgggaatctcgaagagtttcttcgtcgcttcgctttctctgctcctcgcggttctcgcgtccaccggcgagggaagccaccagccggtcgtaatgccggtggcgatggagctgtctgccaagtactacaggaagacgtgccccaacgtgcagaacgccgtgcgcacggtgatggagcacaggctggacatggcgccggccgtcctccgcctcttcttccacgactgcttcgtcaacggttgtgacgcctctgttcttctgaaccggacggacaccatggagagcgagaaggacgccgagccggccaacacctcgctcgccgggttcgacgtcatcgacgagatcaagtcggtgctggagcacgactgcccggccaccgtctcctgcgccgacatcctcgcgctcgcctcccgcgacgccgtcgccctcctcggcgggccgagatggagcgtgccgctcggccgcatggactcgcggcaagccagcaaagcggtcgccgaggacgccaacaacctcccgaacccgaacagcgatctcggcgagctcctcagggtgttcgagacgcacggcctcgacgcccgcgacttcaccgcgctctccggcgcgcacaccgtcggcaaggcccacagctgcgacaactacagggaccgcgtctatggcgaccacaatatcgacccctcattcgccgcgctccgccggcgktcgtgcgagcagggcagaggcgaggcgccgttcgacgagcagacgccgatgaggttcgacaacaaatactaccaggacctgctccatcggcgcgggctcctcacctccgaccaggagctctacacccatggcggggaggtaactagtgagcttgtggagctgtacgcgaagagccgtaaggcgttcttcgcggacttcgcgagggcgatggtgaagatgggggagatacgcccgccggagtggattccggtggaggtgaggctcaactgcgggatggtcaacaattga

SEQ ID NO: 6 - protein, 329 aa, Oryza sativa
MGISKSFFVASLSLLLAVLASTGEGSHQPVVMPVAMELSAKYYRKTCPNVQNAVRTVMEHRLDMAPAVLRLFFHDCFVNGCDASVLLNRTDTMESEKDAEPANTSLAGFDVIDEIKSVLEHDCPATVSCADILALASRDAVALLGGPRWSVPLGRMDSRQASKAVAEDANNLPNPNSDLGELLRVFETHGLDARDFTALSGAHTVGKAHSCDNYRDRVYGDHNIDPSFAALRRRSCEQGRGEAPFDEQTPMRFDNKYYQDLLHRRGLLTSDQELYTHGGEVTSELVELYAKSRKAFFADFARAMVKMGEIRPPEWIPVEVRLNCGMVNN

SEQ ID NO: 7 - DNA, 402 bp, Oryza sativa
  misc_feature (211)..(211): y = cytosine or thymine
atggaggcttcacgcaaggtgttctcggccatgcttctcatggtgctgctgcttgcagccactgggtgagatgggcgggccggtgatggtggcggaggctcggacgtgcgagtcgcagagccaccggttcaagggcccgtgcgcccgcaaggcgaactgcgccagcgtatgcaacacggagggcttccccgacggctactgccacggcgtycgccgccgctgcatgtgcaccaagccctgcccctgatcgatgaaccagcagctagcgcagcagcttgtgccgccacctcgcgcatgtgtcatcgtgtcgatcgatcggatcctagctgccctatgaatgaataaaagtgtgtggcttatgcgtggttttctcttggagaactttggcttttgtggtgttaa

SEQ ID NO: 8 - protein, 133 aa, Oryza sativa
  misc_feature (71)..(71): Xaa = any naturally occuring amino acid
MEASRKVFSAMLLMVLLLAATGXDGRAGDGGGGSDVRVAEPPVQGPVRPQGELRQRMQHGGLPRRLLPRRXPPLHVHQALPLIDEPAASAAACAATSRMCHRVDRSDPSCPMNEXKCVAYAWFSLGELWLLWC

SEQ ID NO: 9 - DNA, 1989 bp, Oryza sativa
  misc_feature (229)..(229): m = adenine or cytosine
atggcggcggaggagggggcgaggtcgccgacgaggatgctggcggaggggcacctgcgggtggccaccggcgggggcgcgccggccgacggcgggatcgccgtccgccacctcccacaccaccacgcatctaagagagaaggtgctggtgggaaaaatgaacaatacaaccttgaggatgtagattctgtaccatctaagatgtcgaacaaactagttaatgggaacmataaggttcctgctacattagatgactataaaaggcttttagttcctgtaattgaggagtactttagtacaggagatgtggaactggcagcttctgagttaaggagtcttggatctgatcagttccacagttactttatcaagaagctcatatccatggcaatggatcgtcatgacaaagaaaaagaaatggcgtcaattctgttgtctgcgttgtatgcggatctactaggctcttccaagatgagtgaaggttttatgatgcttcttgagtcaacagaagatctatctgtcgacataccggatgctattgatgtcttgtctgtttttgttgctcgtgctgttgtggatgaaatactgcctcctgttttcctcactcgagccagagcactgcttcctgaattttctaaaggtattgaagttctgcaagtttctgagaaaagctacttgtcagccccccatcatgctgagctagttgagcgcaagtggggtgggagcactcactttactgtggaagaggcgaaaaggagaatccaggatattctgaaggagtatattgagagtggagatattgatgaagcttttaggtgtataagggagctgggccttccatttttccatcatgaggttgttaaacgcgctctcaccttgagcatggagaatctgtcatcacagccattaatcctgaagctgttgaaggaatcaactgcaggttgcctgatcagttctaatcaaatgtctaagggtttttgtcggctagcagagagtattgatgatctgagccttgatattccttctgccaagattctctttgacaagctggttctgactgctacatctgaaggatggcttgatgcttcattcactacatcttctgcccctaatgaagatatgcgaaatgcaagtggtgaaaagatcaagcatttcaaagaagaatctggacacataatccaagagtattttctctcagatgatgtcccagaactcattataagccttcaagagctttctgccccagagtacaatcctatcttcctcaagaagcttatcaccctcgctatggacagaaagaatagggagaaggagatggcttctgccctgctttcttcactcagcttggaacttttctccactgatgacatcatgaagggattcatattgctcctgcagtcagcagaagacactgccctcgacattgtggatgctcccagtgaacttgccctcttccttgccagggcagttattgatgaagttctgattccactgaatttggatgagatcggtaacaggcttcgccctaacagcagtggtagtcaaactgtccagatggctcgtgcccttcttgctgctcgccactctggtgagaggatactgcgttgctggggtggcggcactggctgggctgtagaagatgcgaaggacaagatcgcaaagctccttgaagaatacaatactggcggtgacttgggggaggcttgccaatgcatccgtgaccttggaatgcccttcttcaaccatgaagtggtgaagaaagcgcttgttatggcaatggagaaggagaatgaagcaaggatcttggctctgctacaggagtgcttcggtgaggggctgataacaatcaaccagatgacattaggcttcactcgcgtcaaggaaggcctcgatgatctgatcctcgacatcccaaatgcacaggagaagtttggagcatatgtggatctcgcaactgaacgtggatggctgcttccacccttcgcctag

SEQ ID NO: 10 - protein, 662 aa, Oryza sativa
  misc_feature (77)..(77): Xaa = any naturally occuring amino acid
MAAEEGARSPTRMLAEGHLRVATGGGAPADGGIAVRHLPHHHASKREGAGGKNEQYNLEDVDSVPSKMSNKLVNGNXKVPATLDDYKRLLVPVIEEYFSTGDVELAASELRSLGSDQFHSYFIKKLISMAMDRHDKEKEMASILLSALYADLLGSSKMSEGFMMLLESTEDLSVDIPDAIDVLSVFVARAVVDEILPPVFLTRARALLPEFSKGIEVLQVSEKSYLSAPHHAELVERKWGGSTHFTVEEAKRRIQDILKEYIESGDIDEAFRCIRELGLPFFHHEVVKRALTLSMENLSSQPLILKLLKESTAGCLISSNQMSKGFCRLAESIDDLSLDIPSAKILFDKLVLTATSEGWLDASFTTSSAPNEDMRNASGEKIKHFKEESGHIIQEYFLSDDVPELIISLQELSAPEYNPIFLKKLITLAMDRKNREKEMASALLSSLSLELFSTDDIMKGFILLLQSAEDTALDIVDAPSELALFLARAVIDEVLIPLNLDEIGNRLRPNSSGSQTVQMARALLAARHSGERILRCWGGGTGWAVEDAKDKIAKLLEEYNTGGDLGEACQCIRDLGMPFFNHEVVKKALVMAMEKENEARILALLQECFGEGLITINQMTLGFTRVKEGLDDLILDIPNAQEKFGAYVDLATERGWLLPPFA

SEQ ID NO: 11 - DNA, 556 bp, Oryza sativa
  misc_feature (412)..(412): r = adenine or guanine
atggtggtgttcctcccgccgccgccgccgccgccgccgcttgtgccggcgccggcggccgcggccgcggcggcgtgtggtgaggaggcgacgctggtgccaccgctcaacttcgcgatggtcgacgacggcatcttccgctccggcttccccgcggccgccaacttccggttcctcaagtcgctcaacctccgctccatcatcaggtacctgtgcccggagccgtacccggagacgaacgcggagttcctcgccaagaacgggatcaagctccaccagttcggaatcgaggggcgcaaggaaccattcgtcaacatccctgacgacaaaattcgagaggcgctcaaagttgtcctaggacgtaaaaaaccaacctctgcttattcactgcaagagaggcaagggtgctttraggaagcttcagaaaaggggcttgtcttcagtgttcgacgagtaccagggtttcgccgctgcgaaggcgaggagcaccgatcagagattcatggagctgttcgacatctcaagcttgaagcacctgacagcttcacattgttaa

SEQ ID NO: 12 - protein, 185 aa, Oryza sativa
  misc_feature (138)..(138): Xaa = any naturally occuring amino acid
MVVFLPPPPPPPPLVPAPAAAAAAACGEEATLVPPLNFAMVDDGIFRSGFPAAANFRFLKSLNLRSIIRYLCPEPYPETNAEFLAKNGIKLHQFGIEGRKEPFVNIPDDKIREALKVVLGRKKPTSAYSLQERQGCFXEASEKGLVFSVRRVPGFRRCEGEEHRSEIHGAVRHLKLEAPDSFTLL

SEQ ID NO: 13 - DNA, 567 bp, Oryza sativa
atggcagccagagctctcctcgttgtggccatggcggccgcggtgctcgggacagcgatgggcgtcaccacctacacggtgggagctccggccggttcatgggacacacgaaccaactacgcgcagtgggtctctgctatcaccttccgtgtcggtgaccagcttgtcttcaagtactccccagcggcgcacgatgtggtggaggtgaacaaggccgactacgactcctgctctagctccagccccatctccaccttcaactctggcgatgacaccatccctctcgctgctatcggcacccgctatttcatctgcggcttccctggccattgcaccgcagggatgaaggtcgccgtcaaggtggaggccgccaccggcagcaaccctaccccgtcaccattggcccctcttccacgcactcctacagtaatggcaccaaatgcgatgccccctacgaacggtggccggcccacccctccgtcaagctcagcaagcaagcctgttggtgttgcatctctggttggtctgagtttgagtgcaatcgttgctggtctcatggtcttttaa

SEQ ID NO: 14 - protein, 188 aa, Oryza sativa
MAARALLVVAMAAAVLGTAMGVTTYTVGAPAGSWDTRTNYAQWVSAITFRVGDQLVFKYSPAAHDVVEVNKADYDSCSSSSPISTFNSGDDTIPLAAIGTRYFICGFPGHCTAGMKVAVKVEAATGSNPTPSPLAPLPRTPTVMAPNAMPPTNGGRPTPPSSSASKPVGVASLVGLSLSAIVAGLMVF

SEQ ID NO: 15 - DNA, 966 bp, Oryza sativa
atgcggtggcaccccgacaagaaccccaccaacaacaagaaggaggccgaggccaagttcaagcagatctccgaggcctacgaggtccttagtgatccccagaaacgcacaatctatgatcaggtaggggaagaagggctcaaggggcagccgccccctggtgcgggaggtcctggagcatctcccttctaccctggtggtgcccattccaactcttttcacttcaacccaaggagtgcagacgacatttttgccgagttctttggattccgtggtcctttctctagcatgggtggcatgccaagtgtaagtggaggcatgagaggggacccaaggttcccagggtttggcaatgaatatttctcttcacgctttggtggtgagggttccaccagtatgcatcagccgtcacaccaactagcgaaacctccgcccattgagaaccggcttccagtcagccttgcagatctgtacaagggtgtaacaaaaaagatgaagatctcaagagagattatagacttcaacgggagagtttcacagcaggaggaaattttgcagatagaagtaaagccaggttggaagagggggacaaagatcacttttgaagagaaggggaatcaagctccaaacatgaaacctgctgatattgttttcataattgaggagaagccccatgacattttcaccagggagggaaatgatcttgttataacggagaaaatatctttggtggaagcgcttactgggtatactgcacgtatcattacacttgatgcgcgaagtctgtcagtgcccattaattcagtcatccatcctgactatgtggaggtggtccctggagaaggcatgcctaatccaaaagggcccaataagaagggagatctgaagattaaattcaacatcaggttcccttccaggttgacatctgatcaaaaagcagggttcaaaaggctcttgggttcttga

SEQ ID NO: 16 - protein, 321 aa, Oryza sativa
MRWHPDKNPTNNKKEAEAKFKQISEAYEVLSDPQKRTIYDQVGEEGLKGQPPPGAGGPGASPFYPGGAHSNSFHFNPRSADDIFAEFFGFRGPFSSMGGMPSVSGGMRGDPRFPGFGNEYFSSRFGGEGSTSMHQPSHQLAKPPPIENRLPVSLADLYKGVTKKMKISREIIDFNGRVSQQEEILQIEVKPGWKRGTKITFEEKGNQAPNMKPADIVFIIEEKPHDIFTREGNDLVITEKISLVEALTGYTARIITLDARSLSVPINSVIHPDYVEVVPGEGMPNPKGPNKKGDLKIKFNIRFPSRLTSDQKAGFKRLLGS

SEQ ID NO: 17 - DNA, 2148 bp, Oryza sativa
atggcctcctttacctcccagctcggcgccatggccttcggcgccgccccctccaccttgccccttgcggcccggaggagcgggcagctgttcgtggggcggaagcccgcggcggcgtcggtgcagatgcgggtgccgcgggcggggcgggcgcggggggtggcgatgcgggtggcgtgcgagaaggtggtggggatcgacctcgggacgaccaactccgcggtggcggcgatggagggcgggaagccgacggtcatcaccaacgccgagggccagcggacgacgccctccgtggtggcgtacaccaagggcggggagcggctggtcgggcagatcgccaagcggcaggccgtcgtcaacccggagaacaccttcttctccgtcaagcgcttcatcggccgcaagatggccgaggtcgacgacgaggccaagcaggtctcctaccacgtcgtccgcgacgacaacggcaacgtcaagctcgactgccccgccatcggcaagcagttcgccgccgaggagatttccgcgcaggtcttgaggaagttggtggacgatgcatctaagtttttgaatgacaaaattaccaaagcagtggttactgttcctgcatacttcaatgactcacagaggacagcaacaaaagatgctggacgtattgcaggattggaagttctccgcattataaatgagccgactgctgcatcccttgcttatggttttgagaagaaaaacaacgaaacgattcttgtgtttgacttgggaggcggtacctttgatgtctctgtattggaggttggagatggtgtgtttgaggtgctttccacatctggtgacacacaccttggtggcgatgacttcgataagttttatttctgttgggtattttactttggagccatgactcatgaaactcctaaagttgtggattggcttgctagcaactttaagaaagatgaaggcattgatcttctgaaagacaaacaagccctgcagcgactcactgaggcagcagagaaagcgaagatggaactgtctacgctgtctcagacaaacattagcttgcctttcataactgctactgctgatgggcctaaacacatcgagacaactctctccagagccaaatttgaggagctatgttcggacctcattgataggcttaaaactcctgtcactaatgccttgagagatgccaaactgtctgttgataacctggacgaagtgattcttgttggtggatccactcgtatcccttccgtgcaagagcttgtgaagaagatcactggcaaggatcccaatgtcacagtcaaccctgatgaggttgtttctcttggggcagctgtacagggtggagttttggccggagatgtgaaagatgtcgttcttcttgatgttactccattgtctcttggtctggagacgttgggtggagtgatgaccaagattattcccagaaacacaacactgcccacctcaaaatcagaggtattctccacagctgcagatggacagacaagtgttgagataaatgttcttcagggagagagagagtttgtccgggacaacaagtctcttggaagcttccgcttggatggaatccctcctgcaccacgtggtgttccacaaattgaagtcaagtttgatattgatgccaatggtattctctctgttgctgctattgataagggtactgggaagaaacaggatatcaccatcaccggcgctagtacactgccaaaggatgaggttgagagaatggtggaagaggctgacaagtttgctcaggaggacaaagagaaaagagatgccattgataccaaaaaccaggcagactctgtggtctaccagactgagaagcaactgaaggagctaggtgacaaggtacctgcacctgtgaaagagaaggtggatgcaaagctcaacgagctcaaagaggccattgcgggtggatcaacacagagcatgaaggatgccatggctgctttaaacgaggaagttatgcagatcggccaggccatgtacaaccagcagcctaatgctggtgctgctggacctactcctggtgccgatgctggaccgacaagctcaggcggtaagggaccgaatgatggagatgttattgatgcggatttcactgacagcaattga

SEQ ID NO: 18 - protein, 715 aa, Oryza sativa
MASFTSQLGAMAFGAAPSTLPLAARRSGQLFVGRKPAAASVQMRVPRAGRARGVAMRVACEKVVGIDLGTTNSAVAAMEGGKPTVITNAEGQRTTPSVVAYTKGGERLVGQIAKRQAVVNPENTFFSVKRFIGRKMAEVDDEAKQVSYHVVRDDNGNVKLDCPAIGKQFAAEEISAQVLRKLVDDASKFLNDKITKAVVTVPAYFNDSQRTATKDAGRIAGLEVLRIINEPTAASLAYGFEKKNNETILVFDLGGGTFDVSVLEVGDGVFEVLSTSGDTHLGGDDFDKFYFCWVFYFGAMTHETPKVVDWLASNFKKDEGIDLLKDKQALQRLTEAAEKAKMELSTLSQTNISLPFITATADGPKHIETTLSRAKFEELCSDLIDRLKTPVTNALRDAKLSVDNLDEVILVGGSTRIPSVQELVKKITGKDPNVTVNPDEVVSLGAAVQGGVLAGDVKDVVLLDVTPLSLGLETLGGVMTKIIPRNTTLPTSKSEVFSTAADGQTSVEINVLQGEREFVRDNKSLGSFRLDGIPPAPRGVPQIEVKFDIDANGILSVAAIDKGTGKKQDITITGASTLPKDEVERMVEEADKFAQEDKEKRDAIDTKNQADSVVYQTEKQLKELGDKVPAPVKEKVDAKLNELKEAIAGGSTQSMKDAMAALNEEVMQIGQAMYNQQPNAGAAGPTPGADAGPTSSGGKGPNDGDVIDADFTDSN

SEQ ID NO: 19 - DNA, 862 bp, Oryza sativa
atggagaaagtttgtgagaacacagtatctcttgatttcaagcaggctaggtcgagcagttttgtcccagttatccgatcaggggactggtcggatattggaggtcgcgattacatggaagatgctcatgtctttgatgggcatggtggaaaagatgcagctcattatgtgcgtgataacttgccacgggttatcgtggaagatgctgattttcctcttgagctagagaaagttgtcaggagtcttctggaacgacagcgcttacagcaatgatttttggaaggtactgtgcaggtctcttctggttgctaatgctggtgattgccgagcagttctttcaaggcgtggtaccgcaattgaaatgtccaaggaccacaggacttgctgcctcaacgaaagaaagcgtatagaatcacttggcggctatgttgatgatggctatttgaatggtcaattagcagtcactagagcattgggtgactggcatctcgagggtctgaaagaagtgggtgagccaggtggccccttgagcgcggaaccagagctcaagatgatcacactgacgaaggaagacgagttcttgataataggaagcgacggcatctgggacttcttctcgaaccagaatgccgtggatttcaccaggaagaggctccaagagcacaatgacttgaggttgtgctgcaagcagatcgtcgaggaggcaataaggcgaggggcctcagacaacctaacggcggtgatggtctcattccaccaggaggcccctcctcagctcagagtgaacaggacggggagggtcgagcggagcatatcggctgaagggcttcacagcctcagggtgctcctggaaggccaatga

SEQ ID NO: 20 - protein, 287 aa, Oryza sativa
  misc_feature (1)..(287): Xaa = any naturally occuring amino acid
MEKVCENTVSLDFKQARSSSFVPVIRSGDWSDIGGRDYMEDAHVFDGHGGKDAAHYVRDNLPRVIVEDADFPLELEKVVRSLLERQRLQQXFLEGTVQVSSGCXCWXLPSSSFKAWYRNXNVQGPQDLLPQRKKAYRITWRLCXXWLFEWSISSHXSIGXLASRGSERSGXARWPLERGTRAQDDHTDEGRRVLDNRKRRHLGLLLEPECRGFHQEEAPRAQXLEVVLQADRRGGNKARGLRQPNGGDGLIPPGGPSSAQSEQDGEGRAEHIGXRASQPQGAPGRPM

SEQ ID NO: 21 - DNA, 2010 bp, Oryza sativa
atgggtggcatcaaaatcataaccaaaacattctttctcttccttgctctcagccataagttcttcgctgctgctggagaagaggagcgattcctctactctggcttctctggcaccgacatcctcgtcaacggtatggccatggtcaccccaaatggcctcctccagctcaccaatggcatggcacagtccaaaggtcatgcgatccacccaacaccactgcgcttccacgagcatggttccaatggtacgagggtgcgatccttctccgcctctttcgtgtttgccatccgttctatcgcccccggagtgagcgcgcagggcctcaccttcttcgtctccccgaccaagaacttctcaagagccttctccaaccagtttcttggcctcctcaacaagaagaacaacggcaacacaagcaaccatatctttgccgttgagcttgacaccgttctaaacaacgatatgcaagacatcaatgacaaccatgttggcatcgacatcaatgatcttaggtccgtggattcctacaacgctggctattatgatgacaagaatggtaccttctgcaacctaactcttgcttctttcgatgcaatgcaagtatgggtggactacaatggcgagaggaagttaatcagtgtgaccttggcccctcttcatatggccaaaccagcaagggcattgcttacaaccacttatgacctatcacaggttctcaagaatcaatcatatgttggtttttcatcctcaacgggtattcttgatacacatcactacgtgcttggttgtagttttggtatgaaccaaccagctccggtcatcgatgtcaagaaactaccaaagctgcctcgtttaggcccaaagccacaatccaagttattgataatcatccttcctgtagctactgcaacattagtacttgctattgttagtggcatagttgtacttagacgacggcaaatgaggtatgctgagctgcgcgaagattgggaagttgaatttggtcctcaccggttctcttacaaggacctattccatgctacggaagggttcaaagacaaacacttgcttggcatcggaggatttgggagagtgtacaagggagtgcttacaaaatcaaagtcggaagttgcagtgaaaagagtgtcacatgaatcaaggcaaggaatgagggagttcattgctgaggttgttagtattggccgccttcgtcacaagaatattgtgcaactacatggctactgtcgacgtaaaggagagcttctattggtgtacgatcatatgccaaatggaagccttgataaatacttgcacaaccatgataaccaacaaaacctagattggtctcaaaggttccacatcatcaaaggagttgcatctggcctactctatctccatgaggattgggagaaagttgttgtccaccgagatatcaaggcaagcaacgtgcttgttgatgcagagatgaatggtcggctaggcgactttggccttgcaagattatatgaccatggcagtgacccacaaactacacatgtggttggcaccatgggatacatagctccagagctagcacgcatgggcagggcctctgttctcaccgatgtgtttgcatttggcatgttccttcttgaggtgacatgtggacgaagacccattatgcaaagtgaagagcaagattgccctatcatgttggttgatttggtgcttctacattggcgcaatgaatcacttattgatgtcgtcgacaagaggcttcaaaatgaatacaatattgatgaggcatgcctagcactaaagctagggctgctatgctcacattccttgcctagtgcaaggcccaacatgaggcaagtcatgcaattcttggatggcgatatatcattcccagatgaggtattggcacaactcctaagccatgaagggcaggagcatatcatcgtgtcttctccgccaccgtcgacaagctttggtacagtatcaactgacctctccggaggaagataa

SEQ ID NO: 22 - protein, 669 aa, Oryza sativa
MGGIKIITKTFFLFLALSHKFFAAAGEEERFLYSGFSGTDILVNGMAMVTPNGLLQLTNGMAQSKGHAIHPTPLRFHEHGSNGTRVRSFSASFVFAIRSIAPGVSAQGLTFFVSPTKNFSRAFSNQFLGLLNKKNNGNTSNHIFAVELDTVLNNDMQDINDNHVGIDINDLRSVDSYNAGYYDDKNGTFCNLTLASFDAMQVWVDYNGERKLISVTLAPLHMAKPARALLTTTYDLSQVLKNQSYVGFSSSTGILDTHHYVLGCSFGMNQPAPVIDVKKLPKLPRLGPKPQSKLLIIILPVATATLVLAIVSGIVVLRRRQMRYAELREDWEVEFGPHRFSYKDLFHATEGFKDKHLLGIGGFGRVYKGVLTKSKSEVAVKRVSHESRQGMREFIAEVVSIGRLRHKNIVQLHGYCRRKGELLLVYDHMPNGSLDKYLHNHDNQQNLDWSQRFHIIKGVASGLLYLHEDWEKVVVHRDIKASNVLVDAEMNGRLGDFGLARLYDHGSDPQTTHVVGTMGYIAPELARMGRASVLTDVFAFGMFLLEVTCGRRPIMQSEEQDCPIMLVDLVLLHWRNESLIDVVDKRLQNEYNIDEACLALKLGLLCSHSLPSARPNMRQVMQFLDGDISFPDEVLAQLLSHEGQEHIIVSSPPPSTSFGTVSTDLSGGR

SEQ ID NO: 23 - DNA, 1113 bp, Oryza sativa
atggcgtcgaggagcatatcaagctgcacaactgagacggcaaaaggcatccacaggttcgagatcttcagttacagcatgatgaacaccgaagccgaagacgactccatccggtccggcgtcttcaacgtaggaggattcgattgggcgttgctttactaccctgacggcatcgacgacgacagcaagggctacatcggcgtctacctcgagctgatcagcaagaacggcgagccatgggcactcgtcgacgtgaatctgatcaaccagctgcaacccgggcaacctcgtcagctgttcaccaagaccgatgtgcctaccccgttcagatcttcaagctttcaggagtctaccttggggtctctcaagtgcatgaagaggagcgatattgagagcactccagggttcatcgtcaatgactgcatcgtgatcgaatgcaatgttactgtcatctatgagccaaaagtgtctaaaaccagggcattgtgtgacgctgaaactagttcggcattgcgcgagatcgaggtgcctcctatggagatatcgtcggatttcgccaagatgttgaaggacggtgtaggagcagatgtgacattcagagttggagaagacacattccgtgcccacagggcggtgctagctgcgaggtctccagtatttcatgctcagctctgtggaccgatgaaggagaagaaggagacacaaatgcaggagataaccatccaagacatgcagccatctgtcttcgaggctttcctctatttcatctacaccgattgtgttccaagaatggatgatcttggcaatggtgagaagatgcatttgatgatgcatttgcttaaggccggtgaccggtatggattggagaggctcaggatcatgtgcgagagatttctagctacgaacctcgacacggagcatgtatctgcgatactgggtctagctgacttgctagatctcaagaagctcaaggaagcttgcatggagttcatggtcccatctgagagaatggatgccgtggctgcaagtcaagggtaccagcagctgaagagagcatttccctctctggcgtttgaagtgtgggagaggaggagccgtgttcgcaggaattaa

SEQ ID NO: 24 - protein, 370 aa, Oryza sativa
MASRSISSCTTETAKGIHRFEIFSYSMMNTEAEDDSIRSGVFNVGGFDWALLYYPDGIDDDSKGYIGVYLELISKNGEPWALVDVNLINQLQPGQPRQLFTKTDVPTPFRSSSFQESTLGSLKCMKRSDIESTPGFIVNDCIVIECNVTVIYEPKVSKTRALCDAETSSALREIEVPPMEISSDFAKMLKDGVGADVTFRVGEDTFRAHRAVLAARSPVFHAQLCGPMKEKKETQMQEITIQDMQPSVFEAFLYFIYTDCVPRMDDLGNGEKMHLMMHLLKAGDRYGLERLRIMCERFLATNLDTEHVSAILGLADLLDLKKLKEACMEFMVPSERMDAVAASQGYQQLKRAFPSLAFEVWERRSRVRRN

SEQ ID NO: 25 - DNA, 2143 bp, Oryza sativa
  misc_feature (153)..(153): s = guanine or cytosine
  misc_feature (206)..(206): k = guanine or thymine
  misc_feature (216)..(216): k = guanine or thymine
  misc_feature (219)..(219): k = guanine or thymine
  misc_feature (221)..(221): k = guanine or thymine
  misc_feature (1672)..(1672): y = cytosine or thymine
atggccggagcgccgtgcctcctgcgcgtgctagccgtctcctcctgcctctgcctcctcgccgacgccgcgcgcctcctggcggcggcgccggcggaggaagccgacgcgctgctcaagctcaaggccggcatcgtggacggcggcggcgcsctggacacctgggccgccggcacgagcccctgcgatggcggcacctcggcgtkggccggcgtkgtktkcagcaagggcagcgtgctcggcctgcagctggagaaggagggcctgtccggcgagctcgacctcgccccgctcaagagcctcaccggcctccgcacgctcagcttcatggacaacgagttcgccggcgccatgcccgacgtgaagggcctcggcgggctccgcgccatcttcctgtccgggaacaagttctccggcgagatccccgccgacgcgttcgccgggatgggctggctcaagaaggtgtccctgtcgcggaacggcttcaccggcgccatcccggcctcgctcgccgccgtgccgaggctcctcgacctccagctcaacgacaacaagttcacgggcaagatccccgacttcccccagaaggatctcaaggtgttcgacgtctccaacaacgagctggatggggagatcccggcgagcctcaaatcaatcgatccacagatgttcgagggcaacaagaagctctgcggcgcgccagtcgacgcgaaatgcgaggcgccatccccagcggcaacgacgtcgccgccggcggcgacatccggcaagatcgggacctcgccgtctcccacggccgccgccgagacaaccacaacgggcacagtgccagccgaggaggggacgcagggcgcgacgaagcccaccaagggatcgacgtcgttcggcgtcctcgccgcgttcctcggcacgctggccatcatcggcttcgcggtggtcgagctccagaggcggcgagagtacaacacccagaacttcggccctgcagcttcaaccaagcccacattgccatcagctcccgcgtcaccagcaaccaagcccacgcacgccgccgccgccgccaccgccgcagccgccgcgaggggcggcggcgggaaggcgggggagcaagggcggctgacgttcgtgcgggacgacgacagggggaggttcttcgagctgcaggacctgctgaaggcgtcggcggaggtgctcggcgccgccaacctcggcgtgtgctaccgcgctacgctcaccggcggccactccgtggtggtgaagcggttcaaggagatgaaccgcgtggggaaggaggacttcgaggagcacatgcggcggctcggccgcctctcccaccccaacctcctcccgctcatctcctactactaccgcaaggaggagaagctcctcatccacgactacgtccccaacaagagccttgctcacctcctccacgcactggccggcgaggctgaagctggtgaagggggtggcgcgagcgctccaatacctgtacgacgagctgccgatgctgacggtgccgcacggccacctcaagtcgtccaacatcctcctcaacgaccgcttcgaaccgctgctcaccgactactcgctggtcccggtgatgaaccagtcgcactcggcgcagctcatggtggccttcaagtcgccggagcggaggcagttcggccgytcctccaagaagagcgacgtctggtgcctcggcatcctcatcctcgagatcctcaccggccggccgccgtcctacgacccgccgccgcagccggaggcggcgacggcgaacggcgacctcgtcggagcggtggcgtcgacgccggagggggagtggctggagaaggtggtggacgcggacatgatcaggaagtgggaggacgaggagagcaagggggagatggtgaagctgatcaagatcgggatggcgtgctgcgaggccgccgtggacagccggtgggagctcaagacggcggtggagagcatcgaggagctcaagggggggaaggaggaggacgccaacgacgagcactccttctactcctcgatcgacggcgacgaattcgccagcgtcgccatcaactaactcggaaatcaacccacattagcgcgcgcatcggttgtaattaagcagcatcaaatgatatgttaa

SEQ ID NO: 26 - protein, 372 aa, Oryza sativa
  misc_feature (119)..(119): Xaa = any naturally occuring amino acid
  misc_feature (207)..(207): Xaa = any naturally occuring amino acid
  misc_feature (252)..(252): Xaa = any naturally occuring amino acid
  misc_feature (270)..(270): Xaa = any naturally occuring amino acid
  misc_feature (298)..(298): Xaa = any naturally occuring amino acid
  misc_feature (304)..(304): Xaa = any naturally occuring amino acid
RASAGSAPSSCPGTSSPARSPPTRSPGWAGSRRCPCRGTASPAPSRPRSPPCRGSSTSSSTTTSSRARSPTSPRRISRCSTSPTTSWMGRSRRASNQSIHRCSRATRSSAARQSTRNAXAPSPAATTSPPAATSGKIGTSPSPTAAAETTTTGTVPAEEGTQGATKPTKGSTSSASSPRSSARWPSSASRWSSSRGGESTTPRTSAXAASTKPTLPSAPASPATKPTHAAAAATAAAAAGAAAGRRGSKGGXRSCGTTTGGGSSSCRTCXRRRRRCSAPPTSACATALRSPAATPWWXSGSRRXTAWGRRTSRSTCGGSAASPTPTSSRSSPTTTARRRSSSSTTTSPTRALLTSSTAAAGAAAGRRGSKGG

SEQ ID NO: 27 - DNA, 915 bp, Oryza sativa
atgcttgttgttgatccaatgaagagaatcacaattcgtgaaattcgagagcatcaatggtttcagattcgccttcctcgttacttagcagtgcctccaccagacacagcacagcaagccaaaatgattgatgaagatacccttcaagacgttgtaaacttgggttatgaaaaggaccatgtgtgtgaatctctgcgcaatagactgcaaaatgagaccattttccaggcaactgttgcatattatttgctattggacaatcgattccgagctaccagtggctatctgggagcagactatcaagaatcattggagaggaatcttaatcgctttgcttcatcagaatcagcaagttcaaatacaaggcattatctcccaggaagcagtgatcctcatgccagtggtttgcgcccacattatcctgttgaaagaaaatgggctcttggacttcagtctcgagctcagcctcgcgagataatgattgaggtcctaaaggcacttgaagacttaaatgtctgctggaagaagaatggacagtacaacatgaagtgcagatggagcgttgggtatcctcaggccactgatatgttagatgtcaaccacagctttgttgatgactcaattataatggataatggcgatgtaaacgggaggttacctgctgtgatcaagtttgaaatccaggctgcagctatactgctggtgatgccgcagtacaagcttttctttttgctcctgcacacggttattatacgtgtgcatggaaattttgctactgctaggaagaagctatacaatatttgggtagcctatctaactgttgtcgacttggcagccataaaaccatcccgtagtcgacaacatagtaatcttcctcctcgaatccgtgcccagcgagatcagagacagcgttag

SEQ ID NO: 28 - protein, 304 aa, Oryza sativa
MLVVDPMKRITIREIREHQWFQIRLPRYLAVPPPDTAQQAKMIDEDTLQDVVNLGYEKDHVCESLRNRLQNETIFQATVAYYLLLDNRFRATSGYLGADYQESLERNLNRFASSESASSNTRHYLPGSSDPHASGLRPHYPVERKWALGLQSRAQPREIMIEVLKALEDLNVCWKKNGQYNMKCRWSVGYPQATDMLDVNHSFVDDSIIMDNGDVNGRLPAVIKFEIQAAAILLVMPQYKLFFLLLHTVIIRVHGNFATARKKLYNIWVAYLTVVDLAAIKPSRSRQHSNLPPRIRAQRDQRQR

SEQ ID NO: 29 - DNA, 1452 bp, Oryza sativa
atggggaattcttgccaaaatggaacctatgggaacaattaccagaacagcaaccggtttcagaatgaccgttttgcttctcggtacgttgatgggaatgatactgaggattgctactcgggctcgtcaagggccagcttagcgggtgctctgcggcaagggctgaacctaaagtcccctgtccttggatacaagactccaaatgtaagggagctctatactcttggccgggagcttggacagggacagttcgggaaaacatacctctgcactgagattagcacagggtgtcaatatgcatgcaagactatcttaaagagtaatctccgatgtgtgtcagatatcgaggacgtgcgccgtgaaatccagataatgcaccatctttcgggccagaagaatatagtgacaatcaaggacacatatgaggatgagcaggccgtgcacatcgtcatggagctctgtgcaggtggtgagctcttcagcaagattcagaagcgaggtcattacagtgaacggaaggctgcagagcttataaaaattatagttggcatcatagaaacatgccattcacatggagtgatgcaccgggatctcaagccagaaaatttcctcttactggacgcagacgatgaattctcggttaaagcaattgactttggtctatctgtgttcttcagaccaggtcaggttttcagagaggtagtgggaagtccatattatattgctccagaggtattggagaagcgttatggaccagaggctgatatatggactgctggagtgattctctatgtattgctgactggtgttcctccattttgggcagagcatccatggatatgtgataatggagtggctactaatcgagctctggatccaagtgtacttcctcgtctcaagcaattttctgcaatgaataggttaaagaaattgtctctccagattattgctgagcgtctttcagaagaggagattgttgggttaagagaaatgttcaaggctatggacaccaaaaacagaagtgtggttacatttggtgagcttaagggactgaaaagatacagctcagtgttcaaggatactgaaattaacgacttaatggaagcagctgatgacaccacctccaccatcaactgggaagagtttattgctgcagcagtgtctcttaataaaatagaacgtgagaaacacttgatggcagcctttacatactttgacaaagatggaagtggttttatcacagttgacaagcttcaaaaggcttgcatggaacgtaacatggaagatactttccttgaagagatgattctggaggttgatcaaaacaatgatggtcaaatcgattatgctgaatttgtcacaatgatgcaaagcaacaactttggacttgggtggcaaacggtggaaagcagcctgaatgtagccctgagggaggcaccccaagtatactga

SEQ ID NO: 30 - protein, 483 aa, Oryza sativa
MGNSCQNGTYGNNYQNSNRFQNDRFASRYVDGNDTEDCYSGSSRASLAGALRQGLNLKSPVLGYKTPNVRELYTLGRELGQGQFGKTYLCTEISTGCQYACKTILKSNLRCVSDIEDVRREIQIMHHLSGQKNIVTIKDTYEDEQAVHIVMELCAGGELFSKIQKRGHYSERKAAELIKIIVGIIETCHSHGVMHRDLKPENFLLLDADDEFSVKAIDFGLSVFFRPGQVFREVVGSPYYIAPEVLEKRYGPEADIWTAGVILYVLLTGVPPFWAEHPWICDNGVATNRALDPSVLPRLKQFSAMNRLKKLSLQIIAERLSEEEIVGLREMFKAMDTKNRSVVTFGELKGLKRYSSVFKDTEINDLMEAADDTTSTINWEEFIAAAVSLNKIEREKHLMAAFTYFDKDGSGFITVDKLQKACMERNMEDTFLEEMILEVDQNNDGQIDYAEFVTMMQSNNFGLGWQTVESSLNVALREAPQVY

SEQ ID NO: 31 - DNA, 915 bp, Oryza sativa
atgttactcatcctcaggtttctgaacaagggtgcaattgtaatgggtgatgatataaatgttgatggttctgcaagaaactcttgggagctttgcaacgtccaacaaatagaggaggtcaaatgcttaataagaattgtgccggtttgtatttctggagtcttatgctttgtcgcattggctcagcaattcacctatataatcttgcaaacatttacaatggactgtcactttgggacgcactttgaaatcccagcaggctctgttgtatccatatcccttattgccctaactctattcatccccatttatgaccggattttagtaccaatagctagaggattcactggagtggaaagtggtattacacttctacagagacagggtataggattggccatttctcccatttcaatggtggtagcaggacttgtcgaacgtaagaggaggaactcagccttgtcgaatggaggaatatcgcctatgtcagtcttgtggcttgcaccccaacttgttttaatgggtattgctgaggccttcaatgcagttggacaaatagaattctacaataagcagtttccagagaacatgcaaaccctagcaggatctctgttcttctgtactatagctggagcaaactacctgagtactgctctggcaaacatcatgagaaaggtcacgaccagagatggtcactcaagctggttaacagacaacattaatcttggcaaactcgactattacttctattttattgcccttatgggagtcctgaaccttatttattttcttatatgctcacacttctaccaatataaggtaatgtcactccattctgaagaatccatcaaaatacctaccaaggaagaagaagccacagagatcgacattgacacagatgcacctagcaaatga

SEQ ID NO: 32 - protein, 304 aa, Oryza sativa
MLLILRFLNKGAIVMGDDINVDGSARNSWELCNVQQIEEVKCLIRIVPVCISGVLCFVALAQQFTYIILQTFTMDCHFGTHFEIPAGSVVSISLIALTLFIPIYDRILVPIARGFTGVESGITLLQRQGIGLAISPISMVVAGLVERKRRNSALSNGGISPMSVLWLAPQLVLMGIAEAFNAVGQIEFYNKQFPENMQTLAGSLFFCTIAGANYLSTALANIMRKVTTRDGHSSWLTDNINLGKLDYYFYFIALMGVLNLIYFLICSHFYQYKVMSLHSEESIKIPTKEEEATEIDIDTDAPSK

SEQ ID NO: 33 - DNA, 500 bp, Oryza sativa
atgcctcgcggtgggttctcggggtcgataagctcgcccaggatcgacgtcgccatcgacatggggaaccccttcctcaaccgcaccgtcgacggcttcctcaagatcggcgccgtcggggcgtgcaaggtcgccgccgaggacacattcgactgcctccacagagctgaagaaaatgtgcaaggagggtgcctattgggatatgcaggtactgttgctggggtgtatgtgggcatggagtacggagtggagaggattcgtggtcgccatgactgggtactccctccatttctttttattttttaccattgaagaatgctatgattggaggtgctttaagtggtgctctgatctctgctgccagcaacaaccacaaagacaagatcatcaaggacgccatcaccggaggcgctgttgcaacagctgtcgagttcatcaactacctcacttagtcatgtaactgcgtttttgcagtggcttttgttggacagcaagaataa

SEQ ID NO: 34 - protein, 152 aa, Oryza sativa
ARPGSTSPSTWGTPSSTAPSTASSRSAPSGRARSPPRTHSTASTPPRTHSTASTELKKMCKEGAYWDMQVLLLGCMWAWSTEWRGFVVAMTGYSLHFFLFFTIEECYDWRCFKWCSDLCCQQQPQRQDHQGRHHRRRCCNSCRVHQLPHLVM

SEQ ID NO: 35 - DNA, 1185 bp, Oryza sativa
atgctacctgctgtgaagctctctcctggccctgtggccttcgctggcaccaatctacggtccagatcagcttcggtttcatctgtctcaagtctcaaaccatccaaatttgtggtctcttcactcagaccactctaccttgcaccactagatggcccaagagctgctgggcaaaaggctcagaggcagccacttgagttcaggtgtgctgcttccgcagccgatgacaaggagtctaagaccgaggtggtgcccgtccgctcggaagctgcccagaagctgaagatctccatctatttcgcgacatggtgggcgcttaatgtgatctttaacatctacaacaagaaggttctcaatgctttcccatacccctggctcacttctacgctctcccttgcctgcggctctgcgatgatgcttgtctcatgggccactcgccttgttgaggcccccaagactgacctagatttctggaaagttcttttcccgggttgctgtggctcatacaattgggcatgttgctgcgacagtgagtatgtcaaaagtagcagtgtcattcacacacattatcaaaagtgcagagcctgcattcagtgttttggtatcaaggttccttcttggggagacgtttccggttcctgtatatctttctcttcttccaatcattggtggatgtgctcttgctgctgtcacagagctgaactttaacatggttgggattcatgggtgccatgatatcaaaccttgcatttgttttccgcaacatcttctcaaagaggggcatgaaggggaaatctgtcagtggcatgaattactatgcctgcctgtcgataatgtcccttgtcatactcacaccattcgctatcgctatggagggccctcaaatgtgggctgctggttggcaaaaggctcttgcggaagttggtcccaatgttgtctgggtgggttgctgcacagagcgttttctaccacttatacaaccaggtgtcttacatgtctctggatgagatttctccattgacatttagcattggcaatacgatgaagcgtatatctgtgattgtttcgtcaatcattatcttccacacacctgtccgccctgtcaatgcactaggagctgccattgccatccttggcacattcctgtattctcaggtaaattcttgctttgatattttactttag

SEQ ID NO: 36 - protein, 393 aa, Oryza sativa
MLPAVKLSPGPVAFAGTNLRSRSASVSSVSSLKPSKFVVSSLRPLYLAPLDGPRAAGQKAQRQPLEFRCAASAADDKESKTEVVPVRSEAAQKLKISIYFATWWALNVIFNIYNKKVLNAFPYPWLTSTLSLACGSAMMLVSWATRLVEAPKTDLDFWKVLFPVAVAHTIGHVAATVSMSKVAVSFTHIIKSAEPAFSVLVSRFLLGETFPVPVYLSLLPIIGGCALAAVTELNFNWLGFMGAMISNLAFVFRNIFSKRGMKGKSVSGMNYYACLSIMSLVILTPFAIAMEGPQMWAAGWQKALAEVGPMLSGWVAAQSVFYHLYNQVSYMSLDEISPLTFSIGNTMKRISVIVSSIIIFHTPVRPVNALGAAIAILGTFLYSQVNSCFDILL

SEQ ID NO: 37 - DNA, 1896 bp, Oryza sativa
  misc_feature (1880)..(1880): w = adenine or thymine
atggcgaagactatggaacgaggacggcgcgaaaggcgaaggatcgtgcggctccgagttagtaaggtctatcaaattgtccagttgaatagtcaatgcttattgcaaattcgatttcagaaaggtgcatccaaaaggagggaacaaattctcttctgtaggtgtggtgatcctctatctctcgtattgccctgggttttgcttatgatggaaggtcatagcaatgaactgggacgggccaacaccttgaagaaaggaggtcttcgaccaatcccggtcatcatcggtaatgtttttggcttaacaaatgaagtatctgaacgaattgtgagcgcatcagttactgcaaaccttattatctaccttacaacaaagtatcacctcggtgctgcaagtagtgcaatcatcatctttgtgtatcaagcagctgcaaattttttgcctgtgtgtggtgcaattgtgtctgatgcactattgggtcgttacctgatggttacattaacattgttctcctgcacaactgggacttttatgctattcctaacatcactaattccaaaattaacacccccagattgtggtctttcaaatcaaggttgtacttcgccatctccactacaactgtttgttctgtgtgcctctcttggtttcatgtcgctcggagcgagtggtgttcgcccctgctgtcttgcctttgctgaggatcaaattgctcattgggacgaagcccaaaaggaccgtgcactccgtggtttgttcagctggtactatgtatcggtcggcttcgcgcagatagtggctgttaccatcctcgtctactttcaagatcaggtgggttggaaggttgggtttgggatttcagccgccgttatgctatccatcacacttgtgaacttggcagcatcacccttctatgtgaagatgaagccacagaggagtatatggatcagcttactgcaagtggttgttgtgtctcttaagaaccaccacctggtacttccgaagacatatcagagtgctcagttccataatgcctcgggattaagagagctagttccatctgaaaaaatgagattcttgaacaaagcatgcattctgagataccatgcaaccaatgtgagcgatggagcaggcagaactaactcatggaacatctgtaccgtggagcaagtggagaacctcaaatctgcactcagcgtgataccgatgtggtcagcaatgataatgaccttcctgatacaaagctcatccttcggggtactacaagcagccaccatggaccggcgagttggcacaaaaaagttccaactaccggcgggctctatctcaatctttgagatcataaccttcacgatatggtcaggctgctatgaccggtacattgtgccatttcttagaagaatcacaggtaggcagcaggtgctaacccttaagcaacggatgggcattggtgtgtccttgtccattgcatccatgcttgtggcatcagcagtggagacatacagaaggaaggttgcggttaagggagggttgcagcacgatgctaagggaacattggaaatgtctgtgctgtggctggcacctcagtatgtcataataggccttgcaggcgcatttagctccattgggcagatcgaattctattatgcggtgcttcccaagtccatggggagctttgtgctagcattgctcttcttcggtgctggtgtcgcaagcatcattgcaacattagtgatcaaggccatcaacctgatcaccggtagaaatggcatggcaccatggctgtccaataacctaaatgagggtcactataactattactacttccttcttgctgtccttggtgccattgacctgatctatgttcatagtttgctcawatgttttcgacgataa

SEQ ID NO: 38 - protein, 631 aa, Oryza sativa
  misc_feature (627)..(627): Xaa = any naturally occuring amino acid
MAKTMERGRRERRRIVRLRVSKVYQIVQLNSQCLLQIRFQKGASKRREQILFCRCGDPLSLVLPWVLLMMEGHSNELGRANTLKKGGLRPIPVIIGNVFGLTNEVSERIVSASVTANLIIYLTTKYHLGAASSAIIIFVYQAAANFLPVCGAIVSDALLGRYLMVTLTLFSCTTGTFMLFLTSLIPKLTPPDCGLSNQGCTSPSPLQLFVLCASLGFMSLGASGVRPCCLAFAEDQIAHWDEAQKDRALRGLFSWYYVSVGFAQIVAVTILVYFQDQVGWKVGFGISAAVMLSITLVNLAASPFYVKMKPQRSIWISLLQVVVVSLKNHHLVLPKTYQSAQFHNASGLRELVPSEKMRFLNKACILRYHATNVSDGAGRTNSWNICTVEQVENLKSALSVIPMWSAMIMTFLIQSSSFGVLQAATMDRRVGTKKFQLPAGSISIFEIITFTIWSGCYDRYIVPFLRRITGRQQVLTLKQRMGIGVSLSIASMLVASAVETYRRKVAVKGGLQHDAKGTLEMSVLWLAPQYVIIGLAGAFSSIGQIEFYYAVLPKSMGSFVLALLFFGAGVASIIATLVIKAINLITGRNGMAPWLSNNLNEGHYNYYYFLLAVLGAIDLIYVHSLLXCFRR

SEQ ID NO: 39 - DNA, 1136 bp, Oryza sativa
atggcgtcggcggcggaggcggtggaggagctcacgaggctgtaccgggagctcccgccgcgccccgccgtcgaggaggtggaggcggcgggtactgacatggaaaaattgagccttatccaagtggcaagcctgatagagtcatcagcaaagaaagggatcacagaactcagcctccgggggaaactggtcgaccagatcgagtggctccctgtttcactcggcaaattgcaagatgttaccgagcttgatctttccgagaataggatcatggcactcccatcaacaattggcagccttagatatttgacaaagcttgacctacactcaaatcagctgatcaatctgcccgacgcgtttggggaactctccaacctaattgatcttgacctgcatgccaaccagcttaagtctcttccttcatcatttggaaatctcacgagcctagcaaaccttgacctgagctcaaatatgttgaaggctcttccagattgtttaggaaaattggcaaacttgagaagattaattgttgagacaaatgagcttgaggagctaccctatactattggatcttgcacatctcttgtggagcttaggttggatttcaatcagttaaaagcccttccagaggccattgggaagttggagaagctggaaatactgacattgcactataacagaatcaaaggattgcctacaacagtgggttcactttccagattgagagagctggatgtcagttttaatgaggttgaagtaatccctgagaacatttgctttgcgacaagtcttgtgaagttgaatctcagcaggaattttgcagacttaagagcactgccgaaatcaataggaaatcttgagatgctagaggagctggacataagcagtaaccagatacgggtactgccagattcgttcaggtgtctttcgaggctacgtgtatttcatgctgatgagactccacttgaatttccaccaagagaagttgtaaacaggctgtggtcaagtatatgaatgatttgaatgctgcaagaggaacaaaccagaagaaaacagatcggggaagcttctggacctggctcttctcgctgtttggttgttgcaaaaagaaccaagaagtgggattgccagtataa

SEQ ID NO: 40 - protein, 377 aa, Oryza sativa
MASAAEAVEELTRLYRELPPRPAVEEVEAAGTDMEKLSLIQVASLIESSAKKGITELSLRGKLVDQIEWLPVSLGKLQDVTELDLSENRIMALPSTIGSLRYLTKLDLHSNQLINLPDAFGELSNLIDLDLHANQLKSLPSSFGNLTSLANLDLSSNMLKALPDCLGKLANLRRLIVETNELEELPYTIGSCTSLVELRLDFNQLKALPEAIGKLEKLEILTLHYNRIKGLPTTVGSLSRLRELDVSFNEVEVIPENICFATSLVKLNLSRNFADLRALPKSIGNLEMLEELDISSNQIRVLPDSFRCLSRLRVFHADETPLEFPPREVVQAVVKYMNDLNAARGTNQKKTDRGSFWTWLFSLFGCCKKNQEVGLPV

SEQ ID NO: 41 - DNA, 1548 bp, Oryza sativa
atggcaccctcatcccgtcgaaaattccgtcggaagaaaccttcacaaaaggtcgactccataggccttcagacaccgcgctcttcggccttggaaaaccaagaacccttgctgagttctgaatattcaggacacaattctgccatacagaatatccctgaagatttgaccgtctgggatgttgtcaaaggcgacgtcgccattgttgccagcaaaatgaaatccatgacagagcggctgctggaagaactcaagatcgcgctccggttgctcatggaggacatcgatgatcagagccatgtagagcaactcgttcgtcttcagaagcatgtcgaaatcaggcctgacctgacatcggcaacgcttctgacggctcaccatgtgcagttggagatgtttgttgccctcaagatggggatcccggcatatctgcacgaaaatgtcagcgtgccacggagccgtctcgcggagatcttcgcctacgagagatgcaagaacatctcctgccagagtgttctcccagctgaggagtgcgactgcgatgtctgctgctgcaggagaggcttctgcaacctctgcatgtgtgtggtctgcaacgggttcgatttcgatgtcaacacatgccgctggattgggtgtgacggctgctctcactggacccacgctggctgcgcaattcgtgaggagcagatcaagactgtgattacggttgaagatggagttgcccactatgtgacagtgttcttctgcaaggcctgccatgggacatctgagctgctggggtgggtcaggaatgtgttccagcattgtgccaagatctggggcacggatgcgttggcgcgagagctcgagtatgttcaggaggtgttcagtgttagcgaggattcgaaagggaagaaattgttcgagaaatgtactgatctgatcgaaagactgaaggttgttcaagctgaatcgatgggtcctgaagttctgcttcaggcgctccaagagattgagctagatgatgctccagagatcactgaaaacgaaaaacaggtgcagcagaacactgatccccatgaaacctgcaacaatcaactctctgaatatgtccaagaaactgcaatgacgaacaagaaggttcgcctctctgtcgatgccatcaccgacggcgaggtggagaaggccaaggaggccgagcagcagctgcagcccatggcggcggagcaggaggaggtcccgccaccgccggcgagcagcagcggcggcgtggcggcgccgacgacgcagaacgcgatgctgtgcaagatactcgacgcgctgagcggcatgccgtcgccgccgtcgtccgagtccgccgccgcggtgtccaaggtgcatgagctgctgcgcgaggccctgagcatgccgcgcagctccggccgcgccaccgccgccgccgtcgacgacgacgacgtggcgcagaacgggagagacagaaatgacggcgacgacccgcggcagatgatgatgctgaaggagatctatgacatggtgatcggcatgacgaagacgatgacgaaatga

SEQ ID NO: 42 - protein, 515 aa, Oryza sativa
MAPSSRRKFRRKKPSQKVDSIGLQTPRSSALENQEPLLSSEYSGHNSAIQNIPEDLTVWDVVKGDVAIVASKMKSMTERLLEELKIALRLLMEDIDDQSHVEQLVRLQKHVEIRPDLTSATLLTAHHVQLEMFVALKMGIPAYLHENVSVPRSRLAEIFAYERCKNISCQSVLPAEECDCDVCCCRRGFCNLCMCVVCNGFDFDVNTCRWIGCDGCSHWTHAGCAIREEQIKTVITVEDGVAHYVTVFFCKACHGTSELLGWVRNVFQHCAKIWGTDALARELEYVQEVFSVSEDSKGKKLFEKCTDLIERLKVVQAESMGPEVLLQALQEIELDDAPEITENEKQVQQNTDPHETCNNQLSEYVQETAMTNKKVRLSVDAITDGEVEKAKEAEQQLQPMAAEQEEVPPPPASSSGGVAAPTTQNAMLCKILDALSGMPSPPSSESAAAVSKVHELLREALSMPRSSGRATAAAVDDDDVAQNGRDRNDGDDPRQMMMLKEIYDMVIGMTKTMTK

SEQ ID NO: 43 - DNA, 2544 bp, Oryza sativa
atggtggaggaagggaggtcactggcggagacgccgacgtggtcggtggccaccgtcaccacgctcatggtcgccgcctgcttcctcgtcgagcgcggcatctcgcgcttcgccaagtggctgcgcaagacgaagcggaaggccatgctcgccgcgctcgagaagatccgcgaagtcttgcttcttgcaaggtgtttgattgtattcctcaccaagggaaacccatgcctgattgcagagctgatgctgctcggcgtcatctcgctgctgctgagccagacggcccgctggatatcggaaatctgcgtgccgtcgtcgctcttcacgagccgattctacatttgctcggagacagattacgaggatctggtggtaggagggaagcgctctaccatggagatgaaccagactgttgtgcctaatggcctgtttggtattcagtcacagaatgtttgcagtgagggtcatgagccttttgtttcatatgaaggccttgaacagctgcatcggttcttgtttatccttggtatcacccatgtgttgtacacttttgtaactgttgttctgtccatgattaagatatatagctggaggaaatttgaaacccaagcatgtcagctccctactgagcagttgcaaggtcttaatatatatttctggatatcctttgcccctgctattttggaactgagtgcgcaatcctgtttcatgaagaaccattacatgattgttctccgtttgacttctgggattctagttcagttctggtgcagctacaacacattgccacttaatgtaatcattactcagatgggatccaagttcaagaaatcactggtctcagagagtgtgagggagtcactccacagctggtgcaagagggtgaaagacaagaacaggcacaacctggcatcgagatccgtctgctccctcgacaccacatacgaggagactgatcatgagactgctacggttggcaccctgtcgagaaccgtgtctgcgacgtccctggacgaggagctgacggtggccaccgtcgaggacaacgacgacgacgaggagatgtctcgcatcgagcaagagattgatcgatcgttggggggaacccgatttccttggttctgccaagctgacgagttcttgatttggggtttatttacaggtggggatcgcgtcgccgtgtgggacggctgctcacgcctcctccgcgccgaggttggttgctgcggccactcaccgggggcggcggcggcagcagcaagggtggttaaggctattgccaacccagacccagcagttgagctgccattgacagctgaaaatgttgagattgtattggatgaagttcgaccataccttatggcagacggaggaaatgttgcattgcatgaaattgatgggaatgtggtgaggttgaagctgcaaggagcatgtggatcatgcccagcttcagtaacaacaatgaagatgggtattgagcgacgcttgatggagaaaattcctgaaattgttgctgtcgagcccattgctgatgaggagactggccttgagttgaaccaggagaatattgaaaaggtactcgatgagattaggccatacctttctggcacaggaggtggtgagcttgaattcgttgcgatcgaggaacctatcgtcaaggttaggcttacgggcccagctgctggtgtgatgacagttcgcgttgccctaactcagaagctcagagaaaagatacctaaaatcgcagctgtccagctattgtcaagaaaaaaacgaaatgcaggagcgacgaacgggatcgggagggagacggcccgagttctggcgaggaggggggcggaggtgatcatcccggcgaggacgatggagagcggcaacgcggtgaagcagagcatcgcggaggaggtcccggggtccaggctccacgtcatggagatggatctcgcctcgctcgactccgtccgccgcttcgccaccgcgttcgactcctcccacacccacctcaacatcctcataaacaatgcagggataatggggtgccctttcaagctatccaaggatgggattgagctgcagttcgcaacgaatcatgtcggtcatttcttgcttacaaatcttctgctcgacaagatgaaatcgacggctaggaagaccggcgtgcagggcaggatcgtgaacgtatcgtctattgcgcacaagagaagtgatggttcttgctttgatctgaacaagctaaacgataagtctaggtcagcaatgtgttcatttttattgttaccgcgtacattatcacaatgcgtgatggtttcaatcctttctgtgggaaacctctttctgaagaacacacaacagggagctgcaaccacatgctatctggcactgcatcctgaactgaaggatgtctccggcaaatacttcgcggactgcaaggaagccacgccgaggcctgctgcgagagacgcagagctagcgaagaggctatgggatttcagcgaacagctcgtggatactaatcgtcgtggagaattcaacagacaaaaatga

SEQ ID NO: 44 - protein, 847 aa, Oryza sativa
MVEEGRSLAETPTWSVATVTTLMVAACFLVERGISRFAKWLRKTKRKAMLAALEKIREVLLLARCLIVFLTKGNPCLIAELMLLGVISLLLSQTARWISEICVPSSLFTSRFYICSETDYEDLVVGGKRSTMEMNQTVVPNGLFGIQSQNVCSEGHEPFVSYEGLEQLHRFLFILGITHVLYTFVTVVLSMIKIYSWRKFETQACQLPTEQLQGLNIYFWISFAPAILELSAQSCFMKNHYMIVLRLTSGILVQFWCSYNTLPLNVIITQMGSKFKKSLVSESVRESLHSWCKRVKDKNRHNLASRSVCSLDTTYEETDHETATVGTLSRTVSATSLDEELTVATVEDNDDDEEMSRIEQEIDRSLGGTRFPWFCQADEFLIWGLFTGGDRVAVWDGCSRLLRAEVGCCGHSPGAAAAAARVVKAIANPDPAVELPLTAENVEIVLDEVRPYLMADGGNVALHEIDGNVVRLKLQGACGSCPASVTTMKMGIERRLMEKIPEIVAVEPIADEETGLELNQENIEKVLDEIRPYLSGTGGGELEFVAIEEPIVKVRLTGPAAGVMTVRVALTQKLREKIPKIAAVQLLSRKKRNAGATNGIGRETARVLARRGAEVIIPARTMESGNAVKQSIAEEVPGSRLHVMEMDLASLDSVRRFATAFDSSHTHLNILINNAGIMGCPFKLSKDGIELQFATNHVGHFLLTNLLLDKMKSTARKTGVQGRIVNVSSIAHKRSDGSCFDLNKLNDKSRSAMCSFLLLPRTLSQCVMVSILSVGNLFLKNTQQGAATTCYLALHPELKDVSGKYFADCKEATPRPAARDAELAKRLWDFSEQLVDTNRRGEFNRQK

SEQ ID NO: 45 - DNA, 2153 bp, Oryza sativa
  misc_feature (760)..(760): r = adenine or guanine
atgggcgaagtggccaccaccaccctgctgctgacgagccatgaagcaaaaccggccaaggcaccgtctatccacgacgccatcgaggtgtacatcggcgccaccggcgcccgccaacttctcaaggccatgctgctggccttcgcttgggctttcgacgcgcagcaggtgttcatgtccgtgttcacggacgcggagccgccatggcactgcaccggcgtcgtcgatgcggttgaggcggcggcgggcgactccggctcgtcctgctcttcgccggccacttcggcttcgccgtgcgcgctcccgctcggcacgtgggagtgggaccgcctggccaagacgtcggtggtgtcggactgggcgctcaactgcagcggcggcggcccagcgctcgtctccctcccggcgtcgtcgttcttcacaggaaacctcgatggccgaagcggccaccaccaccccgctgctgacgagccatgaagcagagccgtccatcgacgacgtcatcgaggcgtacatcggcgccaccggcgcccgccagcttctcaaggccatgctgctggccttcgcttgggctttcgacgcgcagcaggtgttcatgtccgtgttcacggacgcggagccgccatggcactgcaccggcgtcgtcgacgcggctgcggcggcggcggccgactccggctcgtcctgctcgccgccggccgcttccgcttcgccgtgcgcgctcccgcctggcacgtgggattgggaccgcccggccgaracgtcggtggtgtcggactgggcactcaactgcggcccggcgctcgtctccctcccggcgtcgtcgttcttcgccggcaacctcgccggcggcttcctactcgcaacgctcgccgacactcacctgggccgcaggaagatgctcctcctgtcactggtgaccatgtccgtcgccgccgcgctcacggcgttctcgccgaacgtgtgggtgtactccgccctgcggttcgtgtccgggttcggcaggtccatggtgggcacgtcagcgatggtcctgtccacggagctcgacgggaagcggtggcgcaacacggtgagcgccgcgggattcgtcttcttctccgtcgggttcgtgtcgctcccggcgctcgcgtacacgttccgcgaggcgtcgtggcggaacatgtacgtgtggacgtcgctcccgtccctctgctacgccgtcctgctctacctgctcgtccaggagtcgccgcggtggctgctggtgcgcggccggaagcaggaggccatcgaggcggtgcgccagatcgcgtcgctcaacggcggcggcggaggcatcacgacgtcgagcttctccatgctggacgcgtgcgccgtggagctcggggacggcggcgagggcatgttcgccacgctgcactcgatatgggagcggcggcgggcgctccggaggctggcggcgatcactgcggcgagcttcggcgtgggcatggtctactacgggatgccgctcaacgtgggcagcctgagcccctccaaacctctacctgagcgttggcgtacaacgcggtggccgagctcccgtcgtccatcctcgcgtggctcctcatgggcaggtggttcaaccggcgcggctcggtggtcgcgctcaccacggcgtccgggctgtgcagcctcgccgcgtgcgtccccgccgtcgtcctcccggacggcgcgcggatggccgccgaggtggcctcgttcttcgcgtcgtgcacggcgtacgacatgatgctcatgtacaccatcgagctgttcccgacgtcggtgcgcaactcggcggtggggctggtgcggcaggcggtggcgctgggcggcgtggtggctcccgtgctcgtcgcgctcggccgcgagacgacgagctactggtcgtcgtcgttcggcgtgttcgggctcgccgtcggctgcctcgggctgttagtcacctgcctgccggagacgagggggaggaggttgtcggacaccatggaggaggaggaggccgccgtcttgtccagctctggcgcgagcgacatggataacaacggcgagctcgtgtaaacgacgttcaggtttgttctgtacatctttggtgctggatattttcgtgcaggtcggagacgaaactactgtcattcgtcagtcatgtatag

SEQ ID NO: 46 - protein, 305 aa, Oryza sativa
MGEVATTTLLLTSHEAKPAKAPSIHDAIEVYIGATGARQLLKAMLLAFAWAFDAQQVFMSVFTDAEPPWHCTGVVDAVEAAAGDSGSSCSSPATSASPCALPSARGSGTAWPRRRWCRTGRSTAAAAAQRSSPSRRRRSSQETSMAEAATTTPLLTSHEAEPSSTTSSRRTSAPPAPASFSRPCCWPSLGLSTRSRCSCPCSRTRSRHGTAPASSTAAAAAAADSGSSCSPPAASASPCALPPGTWDWDRPAETSVVSTGHSTAARRSSPSRRRRSSPATSPAASYSQRSPTLTWAAGRCSSCHW

SEQ ID NO: 47 - DNA, 1581 bp, Oryza sativa
atggcgggcgatcagatgcacgtgctctccgcgctggacagcgccaagacgcagtggtaccacttcaccgccatcgtcatcgccggcatgggcttcttcaccgacgcctacgacctcttctgcatctccctcgtcaccaagctcatcggccgcgtctactacaccgccgacggcgcgtccaagccgggcagcctgccgcccaacgtctcggcggccgtgaacggcgtcgccttcgtcggcacgctcacggggcagctcttcttcgggtggctcggcgacagggtcggccggaagagcgtctacggcatgacgctgctcttgatgatcatctgctccgtcgcgtcggggctgtcgttcggggacacgccgacgagcgtcatggccacgctctgcttcttccgcttctggctcggcttcggcatcggcggcgactacccgctcagcgccaccatcatgtcggagtacgcgaacaagcggacgcgcggggcgttcatcgccgccgtgttcgcgatgcaggggttcgggatcctcgccggcggcgcggtggcgatcgggatcaccgcgatcttcaggagccggttccccgcgccgccgttcgccgccgacccggcggcgtccaccccgccccaggccgactacgtgtggcggctcatcctcatgttcggcgcgcttcccgcggcgctcaccttctactggcggatgaggatgccggagacggcgcggtacaccgccatcgtcgccaagaacgcggagcgcgccgcggccgacatgtccaaggtgctccaggtgaagatcacggcggagcaggcggagatggcctcgccggtggacaagcccttcaccagcaagcccttcggcctcttctccggcgagttcgcgcggcgccacgggttccacctcctgggcacgacgtcgacgtggctcctcctggacatcgcctactactcccagaacctgttccagaaggacatcttcagcgccatcgggtggatcccggaggcgaagacgatgagcgcgctggacgagctgtaccacatcgcgcgcgcgcagacgctgatcgcgctgtgcgggacggtgccgggctactggttcacggtggcgctgatcgacgtggtcgggcggttcaagatccaggcggcggggttcttcgtgatgacggcgttcatgctggcgctggcggtgccgtacgaccactggacggcggcggggaaccagatcgggttcgtggtgctgtacgcgctcaccttcttcttcgccaacttcgggccgaacgcgacgacgttcatcgtgccggcggagatatacccggcgaggctgcgcgcgacgtgccacgggatatcggcggcgtcggggaaggtgggcgcgatcgtcgggtctttcgggttcctgtacctggcgcagagccccgtcccggccaaggcggcggcgcacggctacccgccgggcatcggcgtccgcaactcgctcttcgcgctcgccggctgcagcttgctcggcttcctcctcaccttccttgtgccggagcccaagggcaagtcgctcgaggagatgtcacgggagaacgaggtcggccagccgtga

SEQ ID NO: 48 - protein, 526 aa, Oryza sativa
MAGDQMHVLSALDSAKTQWYHFTAIVIAGMGFFTDAYDLFCISLVTKLIGRVYYTADGASKPGSLPPNVSAAVNGVAFVGTLTGQLFFGWLGDRVGRKSVYGMTLLLMIICSVASGLSFGDTPTSVMATLCFFRFWLGFGIGGDYPLSATIMSEYANKRTRGAFIAAVFAMQGFGILAGGAVAIGITAIFRSRFPAPPFAADPAASTPPQADYVWRLILMFGALPAALTFYWRMRMPETARYTAIVAKNAERAAADMSKVLQVKITAEQAEMASPVDKPFTSKPFGLFSGEFARRHGFHLLGTTSTWLLLDIAYYSQNLFQKDIFSAIGWIPEAKTMSALDELYHIARAQTLIALCGTVPGYWFTVALIDVVGRFKIQAAGFFVMTAFMLALAVPYDHWTAAGNQIGFVVLYALTFFFANFGPNATTFIVPAEIYPARLRATCHGISAASGKVGAIVGSFGFLYLAQSPVPAKAAAHGYPPGIGVRNSLFALAGCSLLGFLLTFLVPEPKGKSLEEMSRENEVGQP

SEQ ID NO: 49 - DNA, 1577 bp, Oryza sativa
atggccggcggccgcggtggttgagcacggggggcaggccaaggactacccctggcaagctcaaccctctttcgtcttcttctacatgcgtcgtcgtccgccaccggtggtctcatcttcggatatgacatcggtatatcagtggtgtgacgtccatggacccgttccctgaggaagttcttcccggaggtgtatcggaagaagcagatggcggacaaggacaaccagtactgcaagtacgacaaaccagctgctgcagacctttcacctcgtcgctctaccttgccgccctcgtctcctccttcttcgccgccaccgtcacccgcgtcctcggccgcaagtggtccatgttcgccggcggcctcaccttcctcatcggcgccgccctcaacggcgccgccgagaacgtcgccatgctcatcgtcggtcgtatcctcctcggtgtcggtgtcggcgtcggcttcgccaatcagcagtcggtgccggtgtacttgtcggagatggcgccggctcggctgcgggggattctgaacatcgggttccagctgatgatcaccatcggcatcctggcggcggagctgataaactacgggacggcgaagatcaaggccgggtggggatggcgggtgagcctggcgctggccgccgtccccgccgccatcatcaccctcggctccctcttcctcccggacacccccaactcgctcatcgacaggggccacccggaggcggcggagcgcatgctccggcgcatccgcggctccgacgtggacgtgtcggaggagtacgcggacctggtggcggcgagcgaggagtcgaagctggtgcagcacccgtggcgcaacatcctccgccgcaagtaccgcgcccagctcaccatggccatctgcatccccttcttccagcagctcaccgggatcaacgtcatcatgttctacgcccccgtgctgttcgacaccctgggcttcaagagcgacgcgtcgctcatgtccgccgtcatcacgggcctcgtcaacgtcttcgccacgctggtgtccatcttcaccgtggaccgcctcggccgccgcaagctgttcctgcagggcggggcgcagatggtggtgtgccaggtggtggtggggacgctgatcgccgtcaagttcgggacgagcggcatcggcgacatccccaaggggtacgcggcggtggtggtgctcttcatctgcatgtacgtggcagggttcgcgtggtcgtggggcccactggggtggctcgtccccagcgagatcttcccgctggagatccggccggcggggcagagcatcaacgtgtcggtgaacatgctcttcaccttcgtcatcgcgcaggccttcctcaccatgctctgccacatgaagttcggcctcttctacttcttcgccggatgggtcgtcatcatgaccgtcttcatcgccctcttcctccccgagaccaagaacgtccccatcgaggagatggtgctcgtctggaagtcccactggttctggcgccgattcatcggagaccacgacgtccacgtcggcgccaaccacgtctccaacaataagctccaaccataa

SEQ ID NO: 50 - protein, 525 aa, Oryza sativa
  misc_feature (47)..(47): Xaa = any naturally occuring amino acid
  misc_feature (86)..(86): Xaa = any naturally occuring amino acid
  misc_feature (385)..(385): Xaa = any naturally occuring amino acid
GRRPRWLSTGGRPRTTPGKLNPLFVFFTCVVSATGGLIFGYDIGISXGVTSMDPFLRKFFPEVYRKKQMADKDNQYCKYDKPAAAXPFTSSLYLAALVSSFFAATVTRVLGRKWSMFAGGLTFLIGAALNGAAENVAMLIVGRILLGVGVGVGFANQQSVPVYLSEMAPARLRGILNIGFQLMITIGILAAELINYGTAKIKAGWGWRVSLALAAVPAAIITLGSLFLPDTPNSLIDRGHPEAAERMLRRIRGSDVDVSEEYADLVAASEESKLVQHPWRNILRRKYRAQLTMAICIPFFQQLTGINVIMFYAPVLFDTLGFKSDASLMSAVITGLVNVFATLVSIFTVDRLGRRKLFLQGGAQMVVCQVVVGTLIAVKFGTSGXIGDIPKGYAAVVVLFICMYVAGFAWSWGPLGWLVPSEIFPLEIRPAGQSINVSVNMLFTFVIAQAFLTMLCHMKFGLFYFFAGWVVIMTVFIALFLPETKNVPIEEMVLVWKSHWFWRRFIGDHDVHVGANHVSNNKLQP

SEQ ID NO: 51 - DNA, 1728 bp, Oryza sativa
atggacgccggcgacgccatggagagaggccagcagcggctgccagagagctggaacccgaaactccaggacgacgtcagcctgacggtgccactcatccaggacaagaagagcgggagcaaagcgccggcggtggtgctaggattcgagtgcttggagagcacagcgttcaacggcattgccacgaacctggtggtgtacctggagaccgtcctgcacggcagcagcctcgcgagcgcgtccaatgtcacgacgtggttcggcacgagctacctcacgccggtgttcggcgccatcatcgccgacacgttcttcggcaactacaacaccatcctcgtctccctcgtgttctacctcctgggcatggtgctggtcaccttctcggcgttcctgccgaccaccgcgctgtgcgccgtggcgggctcgacgtcgtgccagcagcctgtgtttggcgcgcagaccatcgccttcgtggggctctacctcgtggcgttcggcagcggcggcgtgcgcgcggcgctgctgccgttcggcgcggagcagttcgacgacgacaacgcggtggaccgggagcggaagatgtccttcttcagctggttctacatgtgcgtcgacttcgggatgatcgtgtcgggcctattcatcgtgtggatccagcagaacgtgagctggggactcggcttcggcatcgccacggtttgcgtcgcgatcgcgttcggcggcttcgtgctcgccacgcccatgtacaagcgcagcatgcccaccggcacgccgctcaagagcctcgcccaggtggtggtcgccgcgtgccggaaggtcagcctccgtgtccccgccgacgccgccctcctctacgaggtccatgacaagatcgatcagcccaagatcacgcacaccgacgagttcagctttcttgacaaggcggcggtgatcgtgcagtccgacctggaagaggactcgaacgacgcctcggcggcggccgcgggctcgtggaggctatgcacggtgacgcaggtggaggagctcaagatcctgatgcggctgctgccgatatgggcgacgagcatcgtgctgtcggcggcgtacgcgcagctgaacaccacgttcgtgcagcagggcgccgcgatgaacatgcggatcatgtcgttcaccatccccgccgcgtcgatggtgtccttcgaggtgttctgcgtcctggcatgggtgctcgtctacggctcggtgatcgtgccgctcctcaggagcttctccccggccaacggcgagccgtcgcagctgcggcgcatgggcgccggccgtctgctcatcgcggtcgccatggccatcgccgcgctggtggagatggtgcgcctcgacgcggcggcgcgcggcgagtccctgagcatcgcgtggcagatgccgcagtacttcatgctggccggcggtgaggtgttctgctacatcgcgcagctggagttcttctacagcgaggcgccggagtccatgaagagcatctgcacgtcgctggcgctgctcaccgtggcgctgggaagctacatgagctccttcatctacgccgtcgtgaacgcgttcaccgccgtggacggccggcccgggtggatttcggacaacctcaacgagggacacctggactacttcttctgggtcatgtcggcgctgtgcacgctcaacttcgtcgtgtacagcgcgttcgcgcggaactacaaggtgaagacggtcgtgtcatga

SEQ ID NO: 52 - protein, 575 aa, Oryza sativa
MDAGDAMERGQQRLPESWNPKLQDDVSLTVPLIQDKKSGSKAPAVVLGFECLESTAFNGIATNLVVYLETVLHGSSLASASNVTTWFGTSYLTPVFGAIIADTFFGNYNTILVSLVFYLLGMVLVTFSAFLPTTALCAVAGSTSCQQPVFGAQTIAFVGLYLVAFGSGGVRAALLPFGAEQFDDDNAVDRERKMSFFSWFYMCVDFGMIVSGLFIVWIQQNVSWGLGFGIATVCVAIAFGGFVLATPMYKRSMPTGTPLKSLAQVVVAACRKVSLRVPADAALLYEVHDKIDQPKITHTDEFSFLDKAAVIVQSDLEEDSNDASAAAAGSWRLCTVTQVEELKILMRLLPIWATSIVLSAAYAQLNTTFVQQGAAMNMRIMSFTIPAASMVSFEVFCVLAWVLVYGSVIVPLLRSFSPANGEPSQLRRMGAGRLLIAVAMAIAALVEMVRLDAAARGESLSIAWQMPQYFMLAGGEVFCYIAQLEFFYSEAPESMKSICTSLALLTVALGSYMSSFIYAVVNAFTAVDGRPGWISDNLNEGHLDYFFWVMSALCTLNFVVYSAFARNYKVKTVVS

SEQ ID NO: 53 - DNA, 597 bp, Oryza sativa
  misc_feature (193)..(193): r = adenine or guanine
atggtgctctgggtcttcggctatggctccctgatctggaaccccggattcgacttcgatgagaagatcctgggcttcgtcaagggctacaaacgcaccttcaatcttggcttgcattgaccatcggggcacgccggagcatcctgcgaggacctgcacacttgagtccgacgaggaagccatatgctggggrattgcatactgtgtcaaaggggggcttaaaaaggagcaagaagcaatgaaggaaggagattctttgaagccagctgtgacaggtgtactagttttgtatccactcctgatccagtaggcaacaaatactatcttgggcctgctcctttggaggacatggcaagaggcaaattgctacagccaatggccccaatgggaataacagggattacctgttctcaatggagaaggcattgtccaacatatggccatgaagatgattcaatcatcgagctagctaacgaggtcaggaaggtgttgagccggccgaaggagaagatcactggctccgatagcccacaaaaatctcacgctctcgtacacctgtctgcgcttcctgagggcactgttgtggactcaagatag

SEQ ID NO: 54 - protein, 198 aa, Oryza sativa
MVLWVFGYGSLIWNPGFDFDEKILGFVKGYKRTFNLGLIDHRGTPEHPARTCTLESDEEAICWGIAYCVKGGLKKEQEAMKEGDSLKPAVTGVLVFVSTPDPVGNKYYLGPAPLEDMARQIATANGPNGNNRDYLFSMEKALSNIWGHEDDSIIELANEVRKVLSRPKEKITGSDSPQKSHALVHLSALPEGTVVDSR

SEQ ID NO: 55 - DNA, 500 bp, Oryza sativa; identical to SEQ ID NO: 33

SEQ ID NO: 56 - protein, 152 aa, Oryza sativa; identical to SEQ ID NO: 34

SEQ ID NO: 57 - DNA, 1806 bp, Oryza sativa
  misc_feature (752)..(752): k = guanine or thymine
atggctcctcgtgtcatcgtggacacgtaccctcgtgcatgcgcgcatggtgttcaacgcctagctcagctcaccgctctgttcgcgtaccactataaataccggcagctaggctcgtctactccttccactaatcaccaatcatcagcaaatcagcagcttccatctcctccccaaagccatcgtcttcgtctccaccctccccgggccatccccctccctcccgccatcgccgcgcgctcgaagctcgcctcgcctcgctacaggcgcggtacaggcgcgcccagcttccggcgaggcgccggggcggctcggataatcccctcagcagttgaaccagcaagtgacagacctaatggacatggaagaggtcctcaaattatttggaaagggctatagtacttgatgaaatgatgaagtcaacggtattttctgcggttgctgtttctattggttatacattacttggatgggattttacaaccgttttgggtaatccttctgctggaggctaatatccacatgaagaaggaatttggtttgaacaacggaccttctattgatggaataattttagcagtttcagttttcgggtctatcgcaatcacagtattctctggatcgctattagattggcttggcagacgtgaatagtattctcctattgcctgatattctggatgacactgataccttcacctaactggagaattatgatcggcgcaatcttggctccttccttggtctacttkgctttattggtgttctacttgccagagtcacctagatggcttgtaagtgatggaaaaattagtgaggcccgaatttccttacagtggcttagagggaaagatgatgtatcagatcagatagatctgcaggagaaatagctcttattgcggatggtatgaacatgataacggaaacagctgttggaggacatgctgttggtgctgttcgaagtcaaagttttcttggaactagcacaaaccagatgtcgcgccacagtactttctattggcacctgtcagatccattagttgatcttcttggaagcatccatgagagtatgtcggaattaggagctgggcgaaacagctacttccctgtcttcaacagttttaatattgtggaacaagaacagacgagtgagcagagggggaatgatagtcttcaacaatctagggaggcatattctgctgaagaaggcaataatggagataatttgcaagcttctctactttcccaagtagcaagtgctgaaacaaacgatataaatacatcattcacctctgaagggagctcgtcatatttgagaagacatggtacatcaacatcagggcttgcgcaagatttaatatcttctttgcatgatcatgacattgaagaagatgacgaagaaattcatatagcagcattatctagccagcctgcacttggtgcaggactgcatccatttcgacaacaaatggttcggttgtctgaaacagctgacataaagcctaaatggagggtacttcttcagccaggagtcaggcatgccttgtgttatggaatgctgattcaagctcttcaacagcagactactttcaatttactgcttcccggtgatgctaagtaccattgggctcagtggggcatgtgcgatttatgcattcgtgtgctgcttggttctcgtgttcgtctacttaagagttccagagacgaaagggtcttcccttggagctcatagctgagaattttcaagttttcaagacaagaatgtctatagcagatatgtgcactatgttcagtattcaaggatga

SEQ ID NO: 58 - protein, 576 aa, Oryza sativa
  misc_feature (250)..(250): Xaa = any naturally occuring amino acid
MAPRVIVDTYPRACAHGVQRLAQLTALFAYHYKYRQLGSSTPSTNHQSSANQQLPSPPQSHRLRLHPPRAIPLPPAIAARSKLASPRYRRGTGAPSFRRGAGAARIIPSAVEPASDRPNGHGRSSNYLERAIVLDEMMKSTVFSAVAVSIGYTLLGWDFTTVLGNPSAGEANIHMKKEFGLNNGPSIDGIILAVSVFGSIAITVFSGSLLDWLGRREVFSYCLIFWMTLIPSPNWRIMIGAILAPSLVYXALLVFYLPESPRWLVSDGKISEARISLQWLRGKDDVSDSDRSAGEIALIADGMNMITETAVGGHAVGAVRSQSFLGTSTNQMSRHSTFYWHLSDPLVDLLGSIHESMSELGAGRNSYFPVFNSFNIVEQEQTSEQRGNDSLQQSREAYSAEEGNNGDNLQASLLSQVASAETNDINTSFTSEGSSSYLRRHGTSTSGLAQDLISSLHDHDIEEDDEEIHIAALSSQPALGAGLHPFRQQMVRLSETADIKPKWRVLLQPGVRHALCYGMLIQALQQQTTFNLLLPGDAKYHWAQWGMCDLCIRVLLGSRVRLLKSSRDERVFPWSS

SEQ ID NO: 59 - DNA, 923 bp, Oryza sativa
atggtgtcgcgcgtggccgtgctcgcattctgcgtcgccgggatctggtcggcgtacatcacccagggcgtcctccaggaaacccttcgacgaagcggttcgggccggaggcgcggcggttcgaccacctcgcgttcctcaacttcgcgcagaacgtcgtctgcttcgtctggtccttcataaatcaagctgtggtcgagtggtgggagctcctccgctggccgcgcgccgctgcggaagtactggggcgtcagcatcaccaacactgtcggcccggccatggggatcgaggcgctcaagttcatcagctacccagctcaggtaatgctgatgggaactatactgtatggtgtcaagtacacatttccggagtacatttgcacctttcttgttgctgggggtgtatcatcctttgcgttgttgaagacaagctccaagactatcaagaagcttgctaaccctaatgcgcctctgggctacacattgtgcttcctcaacttagcttttgatggttacaccaattcgacccaagatttgataaagtctagaggtatccaaagactaatccatgggatataatgcttggcatgaatctctgggggaccatatacaatgctgtgattatggttttgaggcagtgagattttgccaggagaacccagaggtggcatgggacattctcctgttctgcctgtgtggtgccgtgggtcagaatttcatcttcctaaccatcagccgatttggctctcttactaacactaccatcaccaccacccgcaagttcatgagcattgtcatctcctccgtcatcagtggtaacccactctccttgaagcaatggggttgtgatggtcttttctggtctctctttacaaatctttctcaaatggaagagaaagaaggtcagagaccacaaggaatga

SEQ ID NO: 60 - protein, 307 aa, Oryza sativa
MVSRVAVLAFCVAGIWSAYITQGVLQETLTKRFGPEARRFDHLAFLNFAQNVVCFVWSFINIKLWSSGGSSSAGRAPLRKYWGVSITNTVGPAMGIEALKFISYPAQVMLMGTILYGVKYTFPEYICTFLVAGGVSSFALLKTSSKTIKKLANPNAPLGYTLCFLNLAFDGYTNSTQDLIKSRYPKTNPWDIMLGMNLWGTIYNAVIMVFEAVRFCQENPEVAWDILLFCLCGAVGQNFIFLTISRFGSLTNTTITTTRKFMSIVISSVISGNPLSLKQWGCDGLFWSLFTNLSQMEEKEGQRPQGM

SEQ ID NO: 61 - DNA, 1510 bp, Oryza sativa
atggatccgaggcgcagccactgggagagctcgtcggaggacgtgacgaggccgctgctcccgctgcacgacgacgacggcgcggcgggccggcgctcctgcgccgcgctgaggtcgctgctcgccaacaagtacctggcggtcgcgtcgggccccgtggcgtgcgcgctgatctgcggcctcgtcgacctcggcggccaccgcgccgcgcgcaacatgctcggggtgctcgcctgggtgttcctgtggtggattaccgacgccgtgccgctcgccgtcgcgtccatggcgccgctgttcctcttccccgtgttcggcatctcctcctccgacgccgtcgccaaggcctacatggacgacgtcatctccctcgtcctcggcagcttcatcctcgcgctcgccatcgagcactacaacatccaccgccgcctcgctctcaacatcacgtcgctgttctgcggcgacccggtgaagccgccgctgctgctgctgggaatctgcggcaccaccatgttcatcagcatgtggatccacaacacaccgtgcaccgtgatgatgatgccggtggcgacggggatcctgcagcggttcccgttctccaaggcggtggtgctcggcgtcgtgtacgcgtcggcgatcggcgggatggcgacgctgacgggcaccggcgtgaacatcatcctggtggggatgtggtccacctacttcccggagcagccgcccatcaccttcagctcgtggatgtcgttcgggctcccattggcgctcgtcctcttcgtcgcgctctgggccacgctctgcgtcctgtactgctccaagaacaccgggagggcgctctcagcttacctggacaggagccatctcaggagggagctcagcttgcttgggtttgattgtcctatggatgacgaggagcctgacagatgatattcctgggtggggatcactcttccacggcgaagttggggatggaactgtcactatgatggcgacgctgctgttcataatcccgagcggcaagaacgacggcgagaagctcatggactggggcaagtgccggaggctgcagtggaacatcatcctcctcctcggcgccggcttcgccatcgccgacggcttcagggcgagcggcctgaccgacatcctctccgaggggctcggcttcctccgcggcgcgccggcgctggccatcgcgcccgtggcgtgcgtcttcagcggcgccatcaccgagttcacctccgacgacgcgaccgccacgctggtgctcccgctgctcgccgagctgggcaagtccatcggcgtgcacccgctcctcctcatggtccccggcgccgtcggcgcgcagctgtcctacctgctgcccaccggctcgccgggcaacgtcgtcggcttcagcacgggctacatcagcatcaaggacatggtgatcgccggaacgcccctgaaaattgtcggggttgcagctctcaccatcctactgccaacgttaggtaaattaactgacaagtga

SEQ ID NO: 62 - protein, 503 aa, Oryza sativa
  misc_feature (1)..(503): Xaa = any naturally occuring amino acid
MDPRRSHWESSSEDVTRPLLPLHDDDGAAGRRSCAALRSLLANKYLAVASGPVACALICGLVDLGGHRAARNMLGVLAWVFLWWITDAVPLAVASMAPLFLFPVFGISSSDAVAKAYMDDVISLVLGSFILALAIEHYNIHRRLALNITSLFCGDPVKPPLLLLGICGTTMFISMWIHNTPCTVMMMPVATGILQRFPFSKAVVLGVVYASAIGGMATLTGTGVNIILVGMWSTYFPEQPPITFSSWMSFGLPLALVLFVALWATLCVLYCSKNTGRALSAYLDRSHLRRELSLLGFDCPMDDEEPDRXYSWVGITLPRRSWGWNCHYDGDAAVHNPERQERRREAHGLGQVPEAAVEHHPPPRRRLRHRRRLQGERPDRHPLRGARLPPRRAGAGHRARGVRLQRRHHRVHLRRRDRHAGAPAARRAGQVHRRAPAPPHGPRRRRRAAVLPAAHRLAGQRRRLQHGLHQHQGHGDRRNAPENCRGCSSHHPTANVRXINXQV

SEQ ID NO: 63 - DNA, 2367 bp, Oryza sativa
atgaagatctcaaagattggtaggcgcatatacagagaaaggctggaaacaagggaccgggatgccgacatggaacagcggcgggcatttcaaaaactcatatatgtatcaaatcttgtctttggggatgcatcaacattcctgcttccatggaaacgtctttttggggtcactgattctcagattgatattgctatgcgggaaaatgccaaaatcttatatgcatcacaactcaagtctattgggagaggtcttgacataggcacgcttatcgaagtaaggagagcacaacttgcatacaaactttctgatgagattgctgctgagatgttcaaggagcatgcaaagaagttggttcaagaaaacatttcgtcagctttggacatcgtaaagtcgcgtaccaaagcagcgaatagcccaacacaggttattgaagatgtgaagagcatccttgcttttaatagcttgctcataacactaagcaaacaccctgatcaagatagatttattcgtggtcttggacctatttcgttaggtggagagagtgatcatgataggagggctgatgatctcaagctactatatagggcctatgcaacagaagtactatcagatggacatctggatgatgagaagctcgctcctttgaatcaactgaggaatatatttggactgggcaagcgtgaagcagaatcaatcatgtcagatgtcaaagctcaagtatacagaaagagacttgctaaatcatttaatagtgagttggctgcggcccctagcaaagcagcattcctccaaaatatctgtgaagagttacagtttgatccggaacttgctagtaagatgcatgaagacatttacaggcagaagcttcagcagtttgtagcggatggagagctgaacaaggacgaagtggaagctttgatggcattccaagtgcgtctctgcattccacaagaaactgttgatgctgtccattcagaaatctgtggcaagttgtttgaaaaggttgtcgtggaagcaatttcatctgttgatggatatgacactaatagacgacaggctgttaagaaggcagcacaaggtctgaatttgaaaaacgagtctgtcatggccattttcagcaaagtggtacggaagttattcctgaactacattcagagagcaaaagcagctgggaaccgcattgaaactgcaaaagagctgaaaaagatgatatccttcaacacagtagttgtgagtgagcttttagctgacattaaaggagaaccaacaactgctgaacctcaaacatcagatgcaacctcagaacctgaagtcagcgagtctgagggggatgatgaatacgaatgggaacagctggagacattaaggaaaactaggcctgataaagagctcagagagaaactggcaaagtcaagccagaaagagataaccctcaaagatgacattccattgagagacagagctgagctgtatgaaacatatttggtgttctgtgtcactggggagacgaccaatgtttcatttggaacagcaatctccacaaagaaagataattcagagtatttaatgctgaagcaattaggagacatacttggtttaacccgcaaggaagctcagaatgttcacattaagatggcagaaaaggcatttgtgcaacaggctgaagtgattcttgctgatgggaagttaacagaggccaaggctgaccagcttgcaaagatacagaagcaagttggtcttcctactgagtatgcacagaaaataatcaagaatatcacaacaacaaagttgtcttctgcaattgaagcctctatttctcgaggacagattggtatacagcaggtccgaggattgaaagaagcaaattttcaattggacagcttgattgcagaaccacttcgagaaaacatttacaaaaaatccgttgaggagatcttttcgtcaggcacaggtgaatttgatgaagaggaagtgtatgtaaagatcccagctgatctcatcattaatgctgagaaggccaagtcgattgtccaggacattgcgaagattaggttggataacgcccttgtccaagctgttgctctgcttcggcagaagaagaaagatgaagtggtcgcatccttgaacgacttgcttgcatgcgacgcggctgtgcctgcttcgaagcccctatcatggcctacatcaggagagctggatgatctgtacggcatttacatgaagagcattccgaagcctgaaaagctgtcaaggttgcagtatctgcttggcataagcgacgagaaggccggccagattcgggatgccgcatcggcaggcacactatccgttgcaactgaagaggaggatgaattggtattctag

SEQ ID NO: 64 - protein, 788 aa, Oryza sativa
MKISKIGRRIYRERLETRDRDADMEQRRAFQKLIYVSNLVFGDASTFLLPWKRLFGVTDSQIDIAMRENAKILYASQLKSIGRGLDIGTLIEVRRAQLAYKLSDEIAAEMFKEHAKKLVQENISSALDIVKSRTKAANSPTQVIEDVKSILAFNSLLITLSKHPDQDRFIRGLGPISLGGESDHDRRADDLKLLYRAYATEVLSDGHLDDEKLAPLNQLRNIFGLGKREAESIMSDVKAQVYRKRLAKSFNSELAAAPSKAAFLQNICEELQFDPELASKMHEDIYRQKLQQFVADGELNKDEVEALMAFQVRLCIPQETVDAVHSEICGKLFEKVVVEAISSVDGYDTNRRQAVKKAAQGLNLKNESVMAIFSKVVRKLFLNYIQRAKAAGNRIETAKELKKMISFNTVVVSELLADIKGEPTTAEPQTSDATSEPEVSESEGDDEYEWEQLETLRKTRPDKELREKLAKSSQKEITLKDDIPLRDRAELYETYLVFCVTGETTNVSFGTAISTKKDNSEYLMLKQLGDILGLTRKEAQNVHIKMAEKAFVQQAEVILADGKLTEAKADQLAKIQKQVGLPTEYAQKIIKNITTTKLSSAIEASISRGQIGIQQVRGLKEANFQLDSLIAEPLRENIYKKSVEEIFSSGTGEFDEEEVYVKIPADLIINAEKAKSIVQDIAKIRLDNALVQAVALLRQKKKDEVVASLNDLLACDAAVPASKPLSWPTSGELDDLYGIYMKSIPKPEKLSRLQYLLGISDEKAGQIRDAASAGTLSVATEEEDELVF

SEQ ID NO: 65 - DNA, 1719 bp, Oryza sativa
atgtctcaatcttcccctttcttctccgttgcccgagcacatgctggagcaggagggcgagctgcggctgccgctctcctgctccgtcaccctgttgctcagctgccacctcggattcatggcctgaggtactacccttcagccattgtgtcacctgccaagacactgaactcacacctgagccttccccatgccacaatatcctcctttgccaatgctgataatggctccagcgggcaagcagatgccacagagtctgaggaggagcagaacggggaatctgaactgtcggagatggccaaggcattccatatatcgccccggatggcaatgtcaatctcagtggtgattgcatttgcagcgctcactgtgccactggcgatgcagtcagtggtcttccatgggacgaacaaaatgaaggcactggcatatctgacactgctttcagggttctacatggcatggaacattggggcaaatgatgtggccaatgccatggggacgtcagtagggtctggtgctttgacactccggcaagcagtgcttactgcggcggtgctagagttctctggtgcattccttatgggcacccatgtcaccagcaccatgcagaagggcatcctagtcgcatctgtcttccaaggaaaggactctctgctcttcgctggattgttgtcatccctcgctgctgctggaacatggttgcaggttgcttcctcctacggctggcctgtttcaactacacattgtattgtcggggccatggttggttttgggatagtatttggaggcgtaaatgcagtgttctggagctccttggcaagagtatcttcatcatgggtcatttcaccattgatgggtgctgcagtctcatttattgtttacaagggtatacgaaggttcgtatatagtgcaccaaatccaggtcaggctgcagctgctgctgcaccaattgcagtttttactggtgttactgcaatatcatttgccgcttttcctctcagcaagactttttcaatcgctatcctgcaagcattagcatgtggcgcaataggagccgtaatcgttaacagagtgatccaaaaacagcttggtgacctactgtcctcagaagcagaaaagatagcatctgctgataaggcaaatgctcagcaagttggatttctttcggacatagctggaccaacaggagctcaattgcagattgtatatggtgtatttggatacatgcaggtcttgtcagcatgcttcatgtcatttgctcatggaggcaatgatgtctccaatgccataggccccctggcggcagctttgtccattcttcaaggtgtagcaagcagtgctgagatagtcatacctactgaagtccttgcttggggaggttttggaattgttgcagggcttacaatgtggggttacagggtcatagcaacaattggcaagaaaatcaccgaactaacaccaactagaggttttgcagcagagtttgcagcagcttctgtagtattgtttgcatcaaaacttggattgccaatatctgctacacatacacttgttggtgcagtgatgggagtgggatttgcaagagggctcaatagggtcagagcagagacagtgcgtgaaattgtggcctcctggttagtcacaattccagttggtgctgtgttatctatcttctacacattgctcttcacaaagattctggcatactttatgtga

SEQ ID NO: 66 - protein, 572 aa, Oryza sativa
MSQSSPFFSVARAHAGAGGRAAAAALLLRHPVAQLPPRIHGLRYYPSAIVSPAKTLNSHLSLPHATISSFANADNGSSGQADATESEEEQNGESELSEMAKAFHISPRMAMSISVVIAFAALTVPLAMQSVVFHGTNKMKALAYLTLLSGFYMAWNIGANDVANAMGTSVGSGALTLRQAVLTAAVLEFSGAFLMGTHVTSTMQKGILVASVFQGKDSLLFAGLLSSLAAAGTWLQVASSYGWPVSTTHCIVGAMVGFGIVFGGVNAVFWSSLARVSSSWVISPLMGAAVSFIVYKGIRRFVYSAPNPGQAAAAAAPIAVFTGVTAISFAAFPLSKTFSIAILQALACGAIGAVIVNRVIQKQLGDLLSSEAEKIASADKANAQQVGFLSDIAGPTGAQLQIVYGVFGYMQVLSACFMSFAHGGNDVSNAIGPLAAALSILQGVASSAEIVIPTEVLAWGGFGIVAGLTMWGYRVIATIGKKITELTPTRGFAAEFAAASVVLFASKLGLPISATHTLVGAVMGVGFARGLNRVRAETVREIVASWLVTIPVGAVLSIFYTLLFTKILAYFM

SEQ ID NO: 67 - DNA, 1722 bp, Oryza sativa
  misc_feature (407)..(407): k = guanine or thymine
atggccgaggtgacggtggtccgtgcggagccccaggaggagtccaccctggagcagggtctcctcgccatcccggaggaatccaaccaacttacatacactggagatggatctgtcgacttttctgggaatcctgttgtgaaggagagaactggtagatggagggcatgcccatttatcttaggtaatgagtgctgtgagcggttggcctattatggaatctccacaaaccttgttacatacttgacaaagaaactgcatgatggtaatgcttctgctgctagcaatgtgactgcatggcagggaacttgctacttaactccccttattggagctatactggctgatgcatactggggaaggtattggactattgcaacattctccacgatatacttcattgggakggctgtactgactctttcagcatcagttcctacattcagcctccaccttgcgaaggtcctttgcccaccagcaaatccattgcagtatactgtcttttttcttggactttacctaattgctcttggtactggtggtattaagccctgtgtctcatcctttggagcagatcaatttgatgatacagacccagttgagcgaatccagaagggatctttctttaactggttctatttctcaataaacattggtgctctcatatcaagcagttttctggtttgggtgcaagacaatataggatggggaataggctttggcattccaacaattttcatggggctggccatcataagtttcttctctggaacatcactttatagattccaaaagccaggcggcagtcctattacacgagtatgccaggtggttgttgcctcctttcgcaagtggaacgtacatgttccagaggatagctctcgcttgtatgagttgcctgatggggcttcagcaattgaagggagtcggcaattggagcacaccgatgaactcagatgtctggacaaagctgctacaattactgatcttgatgtgaaagcagatagctttacaaacccatggcgaatatgcactgtgactcaggtggaagaactgaagatattgatgtccaccatgtttgttgagcaagggatgatgcttgatacatcagtaggtccattcaagattcctccagcatctctatctacctttgatgtggtaagtgtcattatatgggtccccctctatgatagtatcttggttccaatagctaggaggttcactggcaacccgaggggctttacagagttacagaggatggggattggtttggtaatctcaatcttttcgatggcggcagctgcagttcttgagattaaaaggttggacattgcaagggctgaacatttggtggatcaaaatgttccagtaccactgaacatctgctggcaaattcctcaatatttcttggttggtgcctcagaggtcttcacatttgtcgggtcacttgagttcttctatgatcaatcaccggatgccatgaggagcctctgcagcgcactgcagcttgtcacaacagctcttgggaattatctcagtgcattcattttgacattggttgcgtacttcacaacaagaggaggaaatcctggatggattcctgataacttgaatcaaggtcacctagattatttcttctggcttcttgctgggctcagttttctgaactttgtgatatatgtcatctgcgcaaacaaatacaaaagcaagaaagcagcttga

SEQ ID NO: 68 - protein, 573 aa, Oryza sativa
MAEVTVVRAEPQEESTLEQGLLAIPEESNQLTYTGDGSVDFSGNPVVKERTGRWRACPFILGNECCERLAYYGISTNLVTYLTKKLHDGNASAASNVTAWQGTCYLTPLIGAILADAYWGRYWTIATFSTIYFIGMAVLTLSASVPTFSLHLAKVLCPPANPLQYTVFFLGLYLIALGTGGIKPCVSSFGADQFDDTDPVERIQKGSFFNWFYFSINIGALISSSFLVWVQDNIGWGIGFGIPTIFMGLAIISFFSGTSLYRFQKPGGSPITRVCQVVVASFRKWNVHVPEDSSRLYELPDGASAIEGSRQLEHTDELRCLDKAATITDLDVKADSFTNPWRICTVTQVEELKILMSTMFVEQGMMLDTSVGPFKIPPASLSTFDVVSVIIWVPLYDSILVPIARRFTGNPRGFTELQRMGIGLVISIFSMAAAAVLEIKRLDIARAEHLVDQNVPVPLNICWQIPQYFLVGASEVFTFVGSLEFFYDQSPDAMRSLCSALQLVTTALGNYLSAFILTLVAYFTTRGGNPGWIPDNLNQGHLDYFFWLLAGLSFLNFVIYVICANKYKSKKAA

SEQ ID NO: 69 - DNA, 2503 bp, Oryza sativa
atgctgtgtctcacctcctcttcctcctccgcgcccgctccgctccttccctctctcgctgatcgaccgagcccgggaatcgcggggcgggggtggcaatgttcgcctgagcgtggtttcttcgccgcgccggtcgtggcctggaaagaaaggtcaagaccaatttctcagttcctgcgactgcgcgaaaaaacaaaaccatggtgactgttgtggaggaggtcgaccaccttcctatatatgatctggaccctaagttggaggaattcaaggatcacttcaactataggataaaaagatacctcgaccagaaatgcctgattgaaaaacatgaggggggccttgaagaattttctaaaggaggctatttgaagtttgggattaatacagttgatggtgccacaatatatcgtgaatgggcgcctgctgcacaagaagcacagctcattggtgagttcaataactggaatggtgcaaaacacaagatggagaaggataaatttggcatttggtcaatcaagatttcacatgtcaatgggaagcctgccatccctcacaattccaaggttaaatttcgctttaggcatgggggtggagcatgggttgatcgtattcccgcatggattcgttatgcaacttttgatgcctctaaatttggagctccatatgatggtgtacactgggatcctccagcctgtgaaaggtcctctacttgtgccttgaactacaataggtacgtgtttaagcatcctcgacctccaaaacctgatgctccacgcatctatgaggctcatgtggggatgagtggtgaagagccagaagtaagcacatacagagaatttgcagacaatgtgttaccacgcatacgggcaaataactacaacacagttcagttaatggcaatcatggaacattcctactatgcttcttttgggtatcacgtgacaaattttttcgcagtcagcagcagatcaggaacaccagaggatctgaaatatcttgttgacaaggcacatagtttaggattacgagttctgatggatgttgtccatagccatgcgagtaataatgtgaccgatggtctaaatggctatgacgttggacaaaacactcatgagtcttattttcatacaggagataggggctaccataaactctgggatagtcgtctgttcaactatgccaattgggaggtcttaagatttcttctttctaatttgagatattggatggacgaattcatgtttgatggcttccgatttgatggggttacatcaatgctataccatcaccatggtatcaataagggatttactggaaactacaaggagtatttcagtttggataccgatgtggatgcaattgtttacatgatgctcgcaaaccatttaatgcataaactcttgccggaagcaactattgttgctgaagatgtttcgggcatgccagtgctttgtcggccagttgatgaaggtggagtagggtttgacttccgcctggcaatggccattcctgatagatggattgactacctgaagaacaaagaggaccgcaaatggtcaatgagtgaaatagtgcaaactttgactaacaggagatatacagaaaaatgcattgcctatgccgagagccatgatcagtcagtccattgttggtgacaagactatagcatttctcttgatggacaaggaaatgtacactggcatgtcagacttgcagcctgcttcacctaccatcaaccgtggcattgcactccaaaagagatgattcacttcattacgatggcccttggaggtgatggctacttaaattttatgggcaatgagagtttggccatccagaatggattgactttccaagagaaggcaacaactggagctatgataaatgcagacgtcagtggagccttgtcgacactgatcaccttcgatacaaggttgtgcctaagtatatcaatagtatatgaatgcatttgatcaagcaatgaatgcactcgaggaggaattttccttcctgtcatcatcaaagcagattgttagcgacatgaacgagaaagataagcaggttattgtctttgaacgtggagatttggtttttgttttcaattttcatcccaacaaaacttacaagggagttacaaagtcggatgtgacttgcccgggaagtacagagtagctctggactctgatgctttggtctttggtggccatggaagaaggttggccatgatgtggatcacttcacgtctcccgagggaatgccaggagtaccagaaacaaatttcaacaaccgccctaactcattcaaagtcctttccccgccccgtacctgtgtgggcttactatcgcgttgatgaagatcgtgaagagctcaggaggggtggagcagttgcttctggaaagattgttacagagtatatcgatgttgaagcaacaagtggggagactatctctggtggctggaagggctccgagaaggacgattgtggcaagaaagggatgaa

SEQ ID NO: 70 - protein, 834 aa, Oryza sativa
  misc_feature (587)..(587): Xaa = any naturally occuring amino acid
  misc_feature (608)..(608): Xaa = any naturally occuring amino acid
  misc_feature (653)..(653): Xaa = any naturally occuring amino acid
  misc_feature (740)..(740): Xaa = any naturally occuring amino acid
MLCLTSSSSSAPAPLLPSLADRPSPGIAGGGGNVRLSVVSSPRRSWPGKKVKTNFSVPATARKNKTMVTVVEEVDHLPIYDLDPKLEEFKDHFNYRIKRYLDQKCLIEKHEGGLEEFSKGGYLKFGINTVDGATIYREWAPAAQEAQLIGEFNNWNGAKHKMEKDKFGIWSIKISHVNGKPAIPHNSKVKFRFRHGGGAWVDRIPAWIRYATFDASKFGAPYDGVHWDPPACERSSTCALNYNRYVFKHPRPPKPDAPRIYEAHVGMSGEEPEVSTYREFADNVLPRIRANNYNTVQLMAIMEHSYYASFGYHVTNFFAVSSRSGTPEDLKYLVDKAHSLGLRVLMDVVHSHASNNVTDGLNGYDVGQNTHESYFHTGDRGYHKLWDSRLFNYANWEVLRFLLSNLRYWMDEFMFDGFRFDGVTSMLYHHHGINKGFTGNYKEYFSLDTDVDAIVYMMLANHLMHKLLPEATIVAEDVSGMPVLCRPVDEGGVGFDFRLAMAIPDRWIDYLKNKEDRKWSMSEIVQTLTNRRYTEKCIAYAESHDQQSIVGDKTIAFLLMDKEMYTGMSDLQPASPTINRGIALQKXMIHFITMALGGDGYLNFMGNXEFGHPEWIDFPREGNNWSYDKCRRQWSLVDTDHLRYKVVPKYINXYMNAFDQAMNALEEEFSFLSSSKQIVSDMNEKDKQVIVFERGDLVFVFNFHPNKTYKGVYKVGCDLPGKYRVALDSDALVFGGHGRXVGHDVDHFTSPEGMPGVPETNFNNRPNSFKVLSPPRTCVAYYRVDEDREELRRGGAVASGKIVTEYIDVEATSGETISGGWKGSEKDDCGKKGM

SEQ ID NO: 71 - DNA, 2283 bp, Oryza sativa
  misc_feature (1681)..(1681): n = any nucleotide
  misc_feature (1699)..(1699): y = cytosine or thymine
  misc_feature (1719)..(1719): s = guanine or cytosine
atgggaagcaatgggattggccaatgccgcatagaactgtccaccatagctgtagtgtttctggacattggattagaaggtggtcaattgactccacactttgatcacagaagacacacttctgcagaccacttgctcagcctgtcgcctgtcagtggaatgcctacatttgcccttcctgttcaagatggtggggttggttttgattatcgccttcatatggctgttcctgacaaatggattgaactcctcaagcaaagtgatgaatcttggaagatgggtgatattgtgcacacactgactaacagaaggtggtcagagaagtgtgttacttatgctgaaagtcatgatcaagcactagttggtgacaaaactattgcattctggttgatggacaaggatatgtatgattttatggctctggacagaccggcaacacctagcattgatcgtggaatagcattgcataaaatgattagacttatcacaatggggttaggaggagaaggctatcttaactttatgggaaatgagttcggacatcctgaatggattgattttccaagagctccacaagtacttccaaatggtaaattcatcccagggaataacaacagttatgataaatgccgtcgaagatttgacctgggtgatgcggactatcttaggtatcgtggcatgctagagtttgaccgcgcgatgcagtctctcgaggaaaaatatgggttcatgacatcagaccaccagtacatatctcgaaagcatgaagaggataagatgattatatttgagaagggagatctggtatttgtgttcaacttccattggagtaacagctattttgactaccgtgttggttgtttaaagccagggaaatataagattgacaactatgcttgcatatgcaccccggtggtcaaggagttgcctttgttagcgatagtcctaggaattacgagcaaagaagttcttggtaatcatcaacacttcatatttacctacactagtcgtgcccattatgttgaccctgccatagtttactccttccatatatttgaaaataaccagtggtcttggactcagatgctggactctttggtggatttggcaggatccatcacactgcagagcacttcactgccgattgttcacatgacaacaggccctactcgttctcagtttattctcctagcagaacctgcgttgtctatgctccagcggaatgagaacaccaagaggcagcatgcaacttctaaacaggtcgtgtggtcctactctgttctgcttatccttgactgctacttcatcttgagtactagcacagctacacaaatgtgtgggatgcttcatcacaaagcaccagcactcccatccctgaaggctgaagagacatctcagctttcctctccgagatcaagcaaaatgaaaatggaagcagcaggcaggttgcaacctgcagtgcacatgagttacttctactcgacccctgacacagtggcctcacctaacacagtttgctccccagctcacatcacatgtactcagattaagccattgataaacttgttaatacgcactgccgctgcttgcttcaaggttgagactgcaggcttggaaggtagaggagttgttagcttaagggtagctactgctagttccttacacattgctcgctgcggtnaaggttgcaagctaagcyagcaagcagaagcaacctgsaagagccttaagaggcgagaggcctggagtgcggcggcggcggcagggagcagcagatgcagatcgttcgtcgtcgcggtcggcgctgtcgctgttcaaggagaaggaggaggagatcgagcggaagaagctggaggtgcgggagaaggtgttctccatgctcggccgggtcgaggaggagaccaagcgcctcgccttcatccgccaggagctggaggtgatgtcggatccgacgcggcgggaggtggagacgatacggaagcgcatcgacaaggtgaaccgccagctcaagccgctcggcaagaactgcctcaagaaggtgaggatgccattgagaaggaatacaaggcgtgcctagaggcttacaacgagaagagcaacgagaaagcaacgcttgtgaacaggttgatggagcttgtgggcgagagcgagcagctgcggatgaagaagctcgaagagctgaacaaaacggatgagccaaatttgtgtgacctcacatgtgtcgtcgcgtttgatatagctgatgggatcacgagtttatctattctgtatggttcagtttaa

SEQ ID NO: 72 - protein, 760 aa, Oryza sativa
MGSNGIGQCRIELSTIAVVFLDIGLEGGQLTPHFDHRRHTSADHLLSLSPVSGMPTFALPVQDGGVGFDYRLHMAVPDKWIELLKQSDESWKMGDIVHTLTNRRWSEKCVTYAESHDQALVGDKTIAFWLMDKDMYDFMALDRPATPSIDRGIALHKMIRLITMGLGGEGYLNFMGNEFGHPEWIDFPRAPQVLPNGKFIPGNNNSYDKCRRRFDLGDADYLRYRGMLEFDRAMQSLEEKYGFMTSDHQYISRKHEEDKMIIFEKGDLVFVFNFHWSNSYFDYRVGCLKPGKYKIDNYACICTPVVKELPLLAIVLGITSKEVLGNHQHFIFTYTSRAHYVDPAIVYSFHIFENNQWSWTQMLDSLVDLAGSITLQSTSLPIVHMTTGPTRSQFILLAEPALSMLQRNENTKRQHATSKQVVWSYSVLLILDCYFILSTSTATQMCGMLHHKAPALPSLKAEETSQLSSPRSSKMKMEAAGRLQPAVHMSYFYSTPDTVASPNTVCSPAHITCTQIKPLINLLIRTAAACFKVETAGLEGRGVVSLRVATASSLHIARCGEGCKLSEQAEATWKSLKRREAWSAAAAAGSSRCRSFVVAVGAVAVQGEGGGDRAEEAGGAGEGVLHARPGRGGDQAPRLHPPGAGGDVGSDAAGGGDDTEAHRQGEPPAQAARQELPQEGEDAIEKEYKACLEAYNEKSNEKATLVNRLMELVGESEQLRMKKLEELNKTDEPNLCDLTCVVAFDIADGITSLSILYGSV

SEQ ID NO: 73 - DNA, 2307 bp, Oryza sativa
atggcgtcgttcgcggtgtccggcgcgaggctcggggtcgtgcgggcggggggcggcggcggcggcggcggcgggggtggcccggcggcgcgatccggcggggtggacttgccgtcggtgctcttcaggaggaaggactccttctcaccgttgtgagctgcgcgggtgctcctgggaaggtgctggtgcctggcggtgggagcgacgacttgctgtcctctgcggaaccagacgtggaaactcaagagcaacctgaagaatctcaggtggaggataaaccacgagttatcccaccaccaggagatgggcagaagatataccaaattgacccaatgctggaaggatttcggaaccatcttgactaccggatacagtgaatacaagagaatgcgtgcagctattgacccaacatgaaggtggcttggatgcattttctcgtggttacgaaaagcttggattcacccgcagtctgcagcattagtaggtgacttcaacaattggaacccaaatgcagatactatgaccagaaatgagtatggtgtttgggagatttccctgcctaacaatgctgatggatcccctgctattcctcatggctcacgtgtaaagagattcggatggatacaccatctggcgtaaaggattcaattcctgcctggattaagtttgctgtgcaggctccaggtgaaataccgtacaacggtatatattatgatccacctgaagaaaggaaaaatatgtattccaacatccttcaacctaaacgaccaaattcgctgcggatatatgaatcacatattggaatgagtagcccggtatgccaataaggaaccgaagataaacacatatgctaattttagggatgaggtgctaccaagaattaaaaagcttgggtacaatgctgtacagataatggcaatccaggagcactcttattacgcaagctttgggtacggtatcatgttactaacttctttgcgccaagtagccgtttcggaaccccagaagacttgaaatctctgattgataaagctcacgagcttggtttgcttgtacttatggatattgttcacagagtcatgcatcaaacaataccctggatggtttgaatggttttgatggtactgatacacattacttccatggtggaccacggggtcatcactggatgtgggattctcgcctgttcaactatgggagttgggaatgtcgaatgcaaggtggtggcttgaagaatacaagtttgatgggtttcgatttgatggggtgacctccatgatgtatactcatcatggtttacagcatttactggcaactatggcgaatattttggatttgctactgatgttgatgcagtagtttacttgatgctggtgaacgatctaattcatgggctttatcctgaggctgtagccattggtgaagatgtcagcgggatgcccacattttgtattcctgttcaagatggtggtgttggttttgactatcgtttgcatatggctgtaccggacaaatggatcgaactcctcaagcaaagtgacgaatattggaaaatgggtgatatcgtgcacaccctaacgaatagaaggtggtcagagaagtgtgttacttatgcagaaagtcatgaccaagcactagttggtgacaagactattgcattctggttgatggataagaggatatgtatgattttatggctctagacagaccttcaacacctcgcattgatcgtgggatagcattacataaaatgattaggcttgtcaccatgggcttaggaggcgaaggctatcttaatttcatgggaaatgagtttgggcatcctggaatggatagatttcccaagaggcccgcaaagtcttccaaatggctcggtcctcccaggaaacaactacagttttgataaatgccgtcgtagatttgaccttggagatgcagattatcttagatatcatggtatgcaagagtttgatcaggccatgcagcatcttgaggaaaaatatgttcatgacatctgagcaccagtatatatcgcgcaaacacgaggaggataaggtgatcatcttcgagagaggagatttggtattcgtgttcaacttccactggagtaatagctattttgactatcgcgtcggttgtttaaagcctggaaagtacaaggacgatggcctctttggtggattcagtcggcttgatcatgatgctgagtacttcactgctgactggccgcatgacaacagaccatgttcattctcggtgtacaccccaagcagaaccgccgtcgtgtatgcacttacagaggactaa

SEQ ID NO: 74 - protein, 768 aa, Oryza sativa
  misc_feature (1)..(768): Xaa = any naturally occuring amino acid
MASFAVSGARLGVVRAGGGGGGGGGGGPAARSGGVDLPSVLFRRKDSFSPLXAARVLLGRCWCLAVGATTCCPLRNQTWKLKSNLKNLRWRINHELSHHQEMGRRYTKLTQCWKDFGTILTTGYSEYKRMRAAIDPTXRWLGCIFSWLRKAWIHPQSAALVGDFNNWNPNADTMTRNEYGVWEISLPNNADGSPAIPHGSRVKRFGWIHHLAXRIQFLPGLSLLCRLQVKYRTTVYIMIHLKKGKICIPTSFNLNDQIRCGYMNHILEXVARYANKEPKINTYANFRDEVLPRIKKLGYNAVQIMAIQEHSYYASFGYGIMLLTSLRQVAVSEPQKTXNLXLIKLTSLVCLYLWILFTESCIKQYPGWFEWFXWYXYTLLPWWTTGSSLDVGFSPVQLWELGMSNARWWLEEYKFDGFRFDGVTSMMYTHHGLQHLLATMANILDLLLMLMQXFTXCWXTIXFMGFILRLXPLVKMSAGCPHFVFLFKMVVLVLTIVCIWLYRTNGSNSSSKVTNIGKWVISCTPXRIEGGQRSVLLMQKVMTKHXLVTRLLHSGXWIRGYVXFYGSRQTFNTSHXSWDSITXNDXACHHGLRRRRLSXFHGKXVWASWNGXISQEARKVFQMARSSQETTTVLINAVVDLTLEMQIILDIMVCKSLIRPCSILRKNMFMTSEHQYISRKHEEDKVIIFERGDLVFVFNFHWSNSYFDYRVGCLKPGKYKDDGLFGGFSRLDHDAEYFTADWPHDNRPCSFSVYTPSRTAVVYALTED

SEQ ID NO: 75 - DNA, 3079 bp, Oryza sativa
  misc_feature (62)..(62): y = cytosine or thymine
  misc_feature (183)..(183): y = cytosine or thymine
  misc_feature (215)..(215): k = guanine or thymine
  misc_feature (217)..(217): s = guanine or cytosine
  misc_feature (837)..(837): r = adenine or guanine
  misc_feature (958)..(958): s = guanine or cytosine
  misc_feature (972)..(973): m = adenine or cytosine
  misc_feature (1003)..(1003): h = adenine, cytosine, or thymine
  misc_feature (1501)..(1501): r = adenine or guanine
  misc_feature (2523)..(2523): k = guanine or thymine
atgcagatgctgctccacgccaattccctcctcctcctcgcgccgacgacctcgcggctctycgcctccgcctcgccggggagatcggggacggcccggccgctgcctccgccgcaggggcacgcgcattccgcccgcgccgccgctcgcgggacacggaggccgcccgccgtcgccgcagcytgccgcggacgccgatggcggtgggggaggaktscgccgccgccgtggcttcccagcaggggttcgtgacggatgcgagggcatactgggtgacaaggtctctgattgcctggaatgtaaacgatcaagacacctccctcttcctgtatgcaagcagagatgccacgatgcacgtatctgatggggccattcatgggttatgattcaaaaattgaactcgaaccagaacatgccagccttccagacaatgtggctgagaagttcccgtttatcagaagttacagaaccttcagagtccctagctctgttgatgtcgcgagccttgtgaaatgccaactagctgtcgcttcttatgatggctcatgggaggcatcaagatgttactggattgcaactacctggtgtattggatgacatgtttgcttatactggaccacttggtgcagttttcagtgataaagatgtcgacctctacctttgggctcctacagctcaggtctgcttgcaaaacaggatgttagagtatgcttctatgatggtccagcaggacctttactgcaaactgtgcaactcaaggagttaaatggtgtttggagtgttactgtaccaagataccgggagaaccagtactatttgtatgagtaggtactggcrtctagtatcatcacagttgagaaatgtttagctgatgatccctatgccagaggggctttctgcatggcacacggacttggttggttgacatatagtgactttagccagcttcctgggatgsattgtcagatgagmmgcaaaccttgagtccttctctgacatagchtctatgagttgcatattcgtgatttcagcagtgctcatgatagcacagtggactgtaactctcgtggaggatttcgtgcatttacatttcaggttgttcagacttaatttactgaacgatttctgtttcaccacctataacaaaacatcctggtcgcattatggaaactgtgatgcaggattcagcaggaatacgtcacctgagaaaattgtctgctgctggcttgactcatgttcatttgttaccaagctttcattttgctagtgttgatgacaacaaaagcaattggaaatttgttggtaaggatgaggctcagctggcaaaactccctccaggttcagatgagcaacaagctgcaatagtatctattcagcaagaggatccttacaattgggggtatggtatgaccctgtactctggggggttccaaaaggaagctatgcaagtaacccagatggtcctagtcgtattattgaataccgacagatggttcagcarggcctgaatcgcataggtcttcgtgttgtcatggatgttgtatacaatcatttagactcaagtggcccctttggtgtctcctcagtgcttgacaagagattgttcctggatattaccttaggcggaacgttaatggtcagatcgaaaatagtgcggctatgaacaatacagcaagtgagcatttcatggttgataggttaatcgtggatgaccttttaaattgggcaataaattacaaagttgatgggttcagatttgatcttatggggcatatcatgaaaagtaccatggtaagataagagcaaaatctgctattcgaagccttacgagggatgtacatggagtggatggttcaaagatatacttgtatggtgaaggatgggactttggtgaggttgcacaaaataagcgtggaataaatgcatcccagattaatatgagtggcacaggaattggtagagtttcaacgataggatccgcgattctgttaatgggggtaatccatttggtaatcctctacagcaaggcttttctaccggtctgttcttggagagcctaatggatattatcagggtaatgaagcagataccaggcgtgaacttgctacatatgctgatcacatacagcagatcggactagctggtaacctgaaggattatgtactaagaactcatactggagaagctaagaagggatcagacatttacacttttgatggatcaccagttggctatacttcatcccctgtagaaactataaactatgtttctgctcatgataatgagactctgtttgatattgtcagtataaagagaccccaattggcctatcgattgatgagaaatgcaggataaatcatttggcttctagcatgatcgcattatcccagctctttcagggaatacctttcttccatgctggtgatgagatactgagatctaagtcacttgatcgagattcatataactctggtgattggtttaacaagcttgattttacatatgaaacaaacaattggggtktaggacttcctccaagagataagaatgaagaaaattggcatttgataaaaccaagattggaaaacccatctttcagacctttgaaaaatcacattctttctgtcttcgacaattttgttgacatcttgaagatcagatactcctcaccgctctttcgtttaagtacagcaagtgacattgagagcaaagggttcgctttcacacacaggtccctcgatggtaccaggagttattgtcatgagcattaaagatgctcaaaatgaaaaatgtaaaatggctcagttagataaaaacttctcttatgtcgtgacgatcttcaatgtctgtccacacgaagtgtctattgaaatccatgatctcgcttcgttggggcttgaattgcatcctattcagttcaggtgaattcatcggatgctctagtcaggcagtcagcatacgaggcgtccaaaggtcgattcaccgtgccaagaagaacaactgcagtgttcgttcaacctagatgttgatgcctttgggaaaacgttcatattatgtcgaaaaatatgaatgaagataa

SEQ ID NO: 76 - protein, 1010 aa, Oryza sativa
  misc_feature (21)..(21): Xaa = any naturally occuring amino acid
  misc_feature (61)..(61): Xaa = any naturally occuring amino acid
  misc_feature (72)..(72): Xaa = any naturally occuring amino acid
  misc_feature (128)..(128): Xaa = any naturally occuring amino acid
  misc_feature (276)..(276): Xaa = any naturally occuring amino acid
  misc_feature (320)..(320): Xaa = any naturally occuring amino acid
  misc_feature (324)..(325): Xaa = any naturally occuring amino acid
  misc_feature (533)..(533): Xaa = any naturally occuring amino acid
  misc_feature (544)..(544): Xaa = any naturally occuring amino acid
  misc_feature (600)..(600): Xaa = any naturally occuring amino acid
  misc_feature (655)..(655): Xaa = any naturally occuring amino acid
  misc_feature (673)..(673): Xaa = any naturally occuring amino acid
  misc_feature (779)..(779): Xaa = any naturally occuring amino acid
  misc_feature (844)..(844): Xaa = any naturally occuring amino acid
MQMLLHANSLLLLAPTTSRLXASASPGRSGTARPLPPPQGTRIPPAPPLAGHGGRPPSPQXAADADGGGGGXRRRRGFPQGFVTDARAYWVTRSLIAWNVNDQDTSLFLYASRDATMHVSDGAIHGLXFKKIELEPEHASLPDNVAEKFPFIRSYRTFRVPSSVDVASLVKCQLAVASYDAHGRHQDVTGLQLPGVLDDMFAYTGPLGAVFSDKDVDLYLWAPTAQVCLQNRDVRVCFYDGPAGPLLQTVQLKELNGVWSVTVPRYRENQYYLYEXVLASSIITVEKCLADDPYARGAFCMAHGLGWLTYSDFSQLPGMXCQMXXNLESFSDIASMSCIFVISAVLMIAQWTVTLVEDFVHLHFRLFRLNLLNDFCSPPITKHPGRIMETVMQDSAGIRHLRKLSAAGLTHVHLLPSFHFASVDDNKSNWKFVGKDEAQLAKLPPGSDEQQAAIVSIQQEDPYNWGYGYDPVLWGVPKGSYASNPDGPSRIIEYRQMVQQGLNRIGLRVVMDVVYNHLDSSGPFGVSSVLDKXIVPGYYLRRNXVNGQIENSAAMNNTASEHFMVDRLIVDDLLNWAINYKVDGFRFDLMGHIMKSTMVXIRAKSAIRSLTRDVHGVDGSKIYLYGEGWDFGEVAQNKRGINASQINMSGTGIGXSFNDRIRDSVNGGNPFGXSSTARLFYRSVLGEPNGYYQGNEADTRRELATYADHIQQIGLAGNLKDYVLRTHTGEAKKGSDIYTFDGSPVGYTSSPVETINYVSAHDNETLFDIVSIKRPQLAXSIDEKCRINHLASSMIALSQLFQGIPFFHAGDEILRSKSLDRDSYNSGDWFNKLDFTYETNNWGXGLPPRDKNEENWHLIKPRLENPSFRPLKNHILSVFDNFVDILKIRYSSPLFRLSTASTLRAKGSLSHTGPSMVPGVIVMSIKDAQNEKCKMAQLDKNFSYVVTIFNVCPHEVSIEIHDLASLGLELHPIQFVNSSDALVRQSAYEASKGRFTVPRRTTAVFVQPRC

SEQ ID NO: 77 - DNA, 432 bp, Oryza sativa
atggatttgctggtggtttcgctgaatgtttgtgtggaagtccacatctataccagacaatgcgagtcccttggcctcgcagacttcccaacagctcaacggttgcattggcatggccatcagcctgggaaacctgactggtctgagacaagccgtttcgtggccttctccacgaaagatgaaacgaaaggcgagatctacgtggccttcaacgccagccatttgccggcggttgttggactcccagagcgcccaggctaccgctgggagccgctggtggacacaggcaagccagcgccttatgacttcctcaccgacgacctgcctgatcgtgctcacgccgtccacctgttctctcatttcctcaactccaatctctaccccatgctcagctactcctccatcatccttgaattgcagcctgatgattga

SEQ ID NO: 78 - protein, 143 aa, Oryza sativa
MDLLVVSLNVCVEVHIYTRQCESLGLADFPTAQRLHWHGHQPGKPDWSETSRFVAFSTKDETKGEIYVAFNASHLPAVVGLPERPGYRWEPLVDTGKPAPYDFLTDDLPDRAHAVHLFSHFLNSNLYPMLSYSSIILELQPDD

SEQ ID NO: 79 - DNA, 1899 bp, Oryza sativa
  misc_feature (324)..(324): m = adenine or cytosine
  misc_feature (880)..(880): k = guanine or thymine
atggcggtcagcctgtggcgcgcggtgatgggcgcggccggcggcggcggctcctcgtcgtcgtccgcggccggcggcgacgcggggggcggcgtggagttctggcacggcggggagcgcacggggtggctgaacaagcagggggagtacatcaagacgtggcggcggcggtggttcgtgctcaagcaggggcggctgttctggttcaaggacgccgccgtgacgcgcggctcggtgccccgcggcgtcatccccgtcgccacctgcctcaccgtcaagggcgccgaggacgtcatcaaccgccagttcgccttcgagctctcmaccccgaccgacaccatgtacttcatcgccgactccgagaaagagaaggaagagtggatcaattccatcggccgatccattgttcagcactcccgctccgtcaccgacgccgaggtcgtcgactacgacagccgccccaactccaagcccccaccgcagccgaagacgagcgaagagagtgaaccgtcagctggaatattgggtggttcaagtctggctatccatgtctccatcactccatcaagtcctttgaaatttgaatttctggatcttgtcttcttcaactttgtcccttaccactcactatggtcctcgatgggcataaagactgttttttcaatggaaaaccttccgcaatggaaaacccggaagcttgggcctctgggcctaaaattccattacgtaaaggctgggaaacacccggaaaaggtcgagctgacctgccttgctaatgctaggtccacctcccggttggcgcccgcgggaaccgtccgggctgcggtcgccgcctatggccgcggcgccggcaagggcaagggcaagcggcgcgtcgtakgcgctttccacgcgccgcccggccgccgccggacggcgctcgtcgccgcgctcccggaaccccttcagccgctctcgccagcgcaggacggcgccgtggcactcgcgtcgactgaggctgatggtggggaggaggtccatggggatgtggcttccgcagaaatctcgtctccctctggtgttcttgggaagacggtgcgtgttagatttgtgctgaagagggaatgcacgttcggccagagcttccaccttgtcggcgacgacccggcgctcggcctctgggatccgtcgaaggcagtgcctttggattggtcagaaggacacgactggactgtggagaaagacttgccagccaacaagttgattgagtacaagttcgtgctgcaagatttgtcgggcaagttgcattggcagaatggtcgtaatagaagcgtacagacaggtgaaactgcaaacattctagtcgtatatgaagattggggtaatgcaaatagtcagacagtagaagaggagggtaaagtgtccattgggatggaggagggtaaattgtccgttgggatggaggaggctgtagttccagatgatagtgaaagcagagatgatattattgtagcagatgagctacaggtggatgacaatctagcggtcatgcaaaatgaatctagtgttcgagaggatgacaagaaatcaacagttgggacagttacttctgttcaagctgaattaatgaagctacatgaagctaaccaaccagagttaattgtagatgaaccacaaattcaagaggcgcttcctgaaacagcggacacagaaccagagaacggcggtgtggcaacgtgcgctgacgaccgttatgccgaaagtacagatgatgacggtgttccagtaggaggtacagatgatgacggtgttccagtagaaaatcggtggaccggtgcttttgaacatgagttgctttggggtttgaaggccctgcagcagctactcatgagcctgggcttcaagatggatacatcatga

SEQ ID NO: 80 - protein, 632 aa, Oryza sativa
  misc_feature (294)..(294): Xaa = any naturally occuring amino acid
MAVSLWRAVMGAAGGGGSSSSSAAGGDAGGGVEFWHGGERTGWLNKQGEYIKTWRRRWFVLKQGRLFWFKDAAVTRGSVPRGVIPVATCLTVKGAEDVINRQFAFELSTPTDTMYFIADSEKEKEEWINSIGRSIVQHSRSVTDAEVVDYDSRPNSKPPPQPKTSEESEPSAGILGGSSLAIHVSITPSSPLKFEFLDLVFFNFVPYHSLWSSMGIKTVFSMENLPQWKTRKLGPLGLKFHYVKAGKHPEKVELTCLANARSTSRLAPAGTVRAAVAAYGRGAGKGKGKRRVVXAFHAPPGRRRTALVAALPEPLQPLSPAQDGAVALASTEADGGEEVHGDVASAEISSPSGVLGKTVRVRFVLKRECTFGQSFHLVGDDPALGLWDPSKAVPLDWSEGHDWTVEKDLPANKLIEYKFVLQDLSGKLHWQNGRNRSVQTGETANILVVYEDWGNANSQTVEEEGKVSIGMEEGKLSVGMEEAVVPDDSESRDDIIVADELQVDDNLAVMQNESSVREDDKKSTVGTVTSVQAELMKLHEANQPELIVDEPQIQEALPETADTEPENGGVATCADDRYAESTDDDGVPVGGTDDDGVPVENRWTGAFEHELLWGLKALQQLLMSLGFKMDTS

SEQ ID NO: 81 - DNA, 1129 bp, Oryza sativa
  misc_feature (328)..(328): w = adenine or thymine
  misc_feature (330)..(330): m = adenine or cytosine
  misc_feature (331)..(331): y = cytosine or thymine
  misc_feature (334)..(334): r = adenine or guanine
  misc_feature (336)..(336): s = guanine or cytosine
  misc_feature (343)..(343): r = adenine or guanine
  misc_feature (345)..(345): m = adenine or cytosine
  misc_feature (349)..(349): r = adenine or guanine
  misc_feature (351)..(352): r = adenine or guanine
  misc_feature (359)..(359): m = adenine or cytosine
  misc_feature (372)..(372): r = adenine or guanine
  misc_feature (391)..(391): s = guanine or cytosine
  misc_feature (858)..(858): w = adenine or thymine
  misc_feature (859)..(859): y = cytosine or thymine
  misc_feature (864)..(864): m = adenine or cytosine
  misc_feature (865)..(865): k = guanine or thymine
  misc_feature (866)..(866): r = adenine or guanine
  misc_feature (868)..(868): m = adenine or cytosine
  misc_feature (881)..(881): y = cytosine or thymine
  misc_feature (887)..(887): m = adenine or cytosine
  misc_feature (892)..(892): s = guanine or cytosine
atgctcttgtgtttgatgatgatgcagggattcaactgggagtcgtggaaggagaatggcgggtggtacaacttcctgatgggcaaggtggacgacatcgccgcagccggcatcacccacgtctggctccctccgccgtctcactctgtcggcgagcaagggctacatgcctgggcggctgtacgatctggacgcgtctaagtacggggcgttccatggcaagggcgtccaggtgatcgccgacatcgtcatcaaccaccgcacggcggagcacaaggacagccggggcatctactgccgactcccgcctcgactggggcccgcacawcmyctrcsgcgatgrcmccgrcrrccacggmaaccggagcccgrattaccggcgccggacatsgaccacctcaacaagcgcgtccagcgggagctcattggctggctcgactggctcaagatggacatcggcttcgacgcgtggcgcctcgacttcgccaagggctactccgccgacatggcaaagatctacatcgacgccaccgagccgagcttcgccgtggccgagatatggacgtccatggcgaacggcggggacggcaagccgaactacgaccagaacgcgcaccggcaggagctggtcaactgggtcgatcgtgtcggcggcgccaacagcaacgccacggcgttcgacttcaccaccaagggcatcctcaacgtcgccgtggagggcgagctgtggcgcctccgcggcgaggacggcaaggcgcccggcatgatcgggtggtggccggccaaggcgacgaccttcgtcgacaaccacgacaccggctcgacgcagcacctgtggccgttcccctccgacaaggwyatgcmkrgmtacgcatacatcytcaccmacccsggcaacccatgcatcttctacgaccatttcttcgattggggtctcaaggaggagatcgggatccacccggcgagcgagctgcgcatcatggaagctgacagcgatctctacctcgcggagatcgatggcaaggtgatcacaaagattggaccaagatacgacgtcgaacacctcatccccgaaggcttccaggtcgtcgcgcacggtgatggctacgcaatctgggagaaaatctga

SEQ ID NO: 82 - protein, 404 aa, Oryza sativa
  misc_feature (70)..(79): Xaa = any naturally occuring amino acid
  misc_feature (110)..(115): Xaa = any naturally occuring amino acid
  misc_feature (125)..(128): Xaa = any naturally occuring amino acid
  misc_feature (130)..(133): Xaa = any naturally occuring amino acid
  misc_feature (136)..(139): Xaa = any naturally occuring amino acid
  misc_feature (149)..(149): Xaa = any naturally occuring amino acid
  misc_feature (305)..(305): Xaa = any naturally occuring amino acid
  misc_feature (307)..(308): Xaa = any naturally occuring amino acid
  misc_feature (313)..(313): Xaa = any naturally occuring amino acid
  misc_feature (315)..(315): Xaa = any naturally occuring amino acid
  misc_feature (336)..(345): Xaa = any naturally occuring amino acid
MLLCLMMMQGFNWESWKENGGWYNFLMGKVDDIAAAGITHVWLPPPSHSVGEQGYMPGRLYDLDASKYGXXXXXXXXXXAFHGKGVQVIADIVINHRTAEHKDSRGIYCXXXXXXDSRLDWGPHXXXXDXXXXHGXXXXTGARITGPDXDHLNKRVQRELIGWLDWLKMDIGFDAWRLDFAKGYSADMAKIYIDATEPSFAVAEIWTSMANGGDGKPNYDQNAHRQELVNWVDRVGGANSNATAFDFTTKGILNVAVEGELWRLRGEDGKAPGMIGWWPAKATTFVDNHDTGSTQHLWPFPSDKXMXXYAYIXTXPGNPCIFYDHFFDWGLKEEIXXXXXXXXXXGIHPASELRIMEADSDLYLAEIDGKVITKIGPRYDVEHLIPEGFQVVAHGDGYAIWEKI

SEQ ID NO: 83 - DNA, 1314 bp, Oryza sativa
atgaagaacaccagcagcttgtgtttgctgctcctcgtggtgctctgcagcttgacctgtaactcgggtcaagcacaggtcctcttccagcagggtttcaactgggagtcgtggaagcagcagggtggctggtacaacatgttgaaaggccaagtcgacgacatcgccaaggccggggtcacccacgtctggctgccgccgccgtcgcactccgtggcgccgcaggggtacatgccggggcgtctctacgacctggacgcgtccaagtacggcacggcggcggagctcaagtcgctgatcgcggcgttccacgggaagggcgtccagtgcgtcgccgacgtcgtgatcaaccaccggtgcgccgagaagaaggacgcccgcggcgtgtactgcgtgttcgagggcgggacgcccgacgaccgcctcgactggggccccggcatgatctgcagcgacgacacgcagtactccgacggcacgggccaccgcgacaccggcgaggggttcggcgcggcgcccgacatcgaccacctcaacccgcgcgtccagcgggagctcaccgactggctcaactggctcaagtccgacgtcggcttcgacggctggcgcctcgacttcgccaagggatactccacggacatcgctaagatgtacgtcgagagctgcaagccgggcttcgtcgtcgccgagatatggaactcgctgagctacaacggcgacggcaagccggcggccaaccaggaccagggccggcaggagctggtgaactgggtgaacgccgtcggcgggccggcgatgacgttcgacttcaccaccaagggcctcctgcaggcgggcgtccagggcgagctgtggcggctgcgcgacggcaacggcaaggccgccggcatgatcgggtggctgccagagaaggccgtcacgttcgtcgacaaccacgacaccggctcgacgcagaagctttggccgttcccctccgacaaggtcatgcagggctacgcctacatcctcacccaccccggagtcccctgcatcttctacgaccacatgttcgactggaacctgaagcaggagataaccgcgctggcggcgatcagggagaggaacggcatcaacgccgggagcaagctccggatcgtcgtcgccgacgccgacgcatacgtcgccgtcgtcgacgagaaggtcatggtgaagatcgggacgaggtacgacgtgggcaacgcggtgccgtcggatttccatcagacggtgcacggcaaggactacagcgtctgggagaaggggtccctccgcgtcccggcggggcggcacctatag

SEQ ID NO: 84 - protein, 437 aa, Oryza sativa
MKNTSSLCLLLLVVLCSLTCNSGQAQVLFQQGFNWESWKQQGGWYNMLKGQVDDIAKAGVTHVWLPPPSHSVAPQGYMPGRLYDLDASKYGTAAELKSLIAAFHGKGVQCVADVVINHRCAEKKDARGVYCVFEGGTPDDRLDWGPGMICSDDTQYSDGTGHRDTGEGFGAAPDIDHLNPRVQRELTDWLNWLKSDVGFDGWRLDFAKGYSTDIAKMYVESCKPGFVVAEIWNSLSYNGDGKPAANQDQGRQELVNWVNAVGGPAMTFDFTTKGLLQAGVQGELWRLRDGNGKAAGMIGWLPEKAVTFVDNHDTGSTQKLWPFPSDKVMQGYAYILTHPGVPCIFYDHMFDWNLKQEITALAAIRERNGINAGSKLRIVVADADAYVAVVDEKVMVKIGTRYDVGNAVPSDFHQTVHGKDYSVWEKGSLRVPAGRHL

SEQ ID NO: 85 - DNA, 1321 bp, Oryza sativa
  misc_feature (492)..(492): m = adenine or cytosine
  misc_feature (1239)..(1239): y = cytosine or thymine
  misc_feature (1255)..(1255): s = guanine or cytosine
atggcaaagcgcatagcctcaatgagcagcctcctccttatcgccttgctctgtctgagctctcacttggcccaagcccaggtcctcttccagtaggggttcaactgggagtcgtggaagaagcagggcgggtggtacaacttcctccatggccacgtcgacgacatcgccgcgaccggtgtcacgcacgtctggctcccaccgccgtcgcactccgtcgccccgcagggatacatgccgggccggctctacgacctggacgcttccaagtacggcacgggggcagagctcaggtcgctgatcgccgccttccacagcaaaggcatcaagtgcgtcgccgacatcgtcatcaaccaccggtgcgcggattacaaggatagccgtggcatctactgcattttcgagggtggcacgccggacagccgcctcgactggggccccgacatgatctgcagcgacgacacgcagtactccaacggccgcggtcaccgmgagcaccggcgcagacttcggcgcggcgcccgacatcgaccacctcaacacgcgtgtgcagacagagctgtccgactggctcaattggctcaagtccgacgtcggcttcgacggctggcgcctcgacttcgccaagggatactcggcggccgtcgccaagacgtacgtcgacaacaccgacccgtccttcgtcgtcgccgagatatggagcaacatgcgttacgacggcaacggtgagccgtcgtggaaccaggacggtgaccggcaggagctggtgaactgggcgcaggccgtcggtggccctgcgtcagcgttcgacttcacgaccaagggcgagctgcaggcggcggtgcaaggtgagctgtggcggatgaaggacggcaacggcaaggcgccggggatgattggctggctgccagagaaggccgtcaccttcatcgacaaccatgacactggctccacacagaactcatggccgttcccctccgacaaggtcatgcagggctacgcctacatcctcacacaccctggagtaccctgcattttctacgaccatgtatttgactggaacctgaagcaggagatcagcacattagctgcagtgagatcaagaaatgagattcatcccgggagcaagctgaaaatccttgctgctgagggagacgtctatgtcgccatgatcgatgataaggtcataacaaagattgggacacggtatgacgtgggcaacttaatcccgtcagactyccatgtcgttgctcasggcaacaattactgcatttgggaaaagagcggtctcagagttcctgcagggcggcaccactattag

SEQ ID NO: 86 - protein, 439 aa, Oryza sativa
  misc_feature (32)..(32): Xaa = any naturally occuring amino acid
  misc_feature (413)..(413): Xaa = any naturally occuring amino acid
  misc_feature (418)..(418): Xaa = any naturally occuring amino acid
MAKRIASMSSLLLIALLCLSSHLAQAQVLFQXGFNWESWKKQGGWYNFLHGHVDDIAATGVTHVWLPPPSHSVAPQGYMPGRLYDLDASKYGTGAELRSLIAAFHSKGIKCVADIVINHRCADYKDSRGIYCIFEGGTPDSRLDWGPDMICSDDTQYSNGRGHRETGADFGAAPDIDHLNTRVQTELSDWLNWLKSDVGFDGWRLDFAKGYSAAVAKTYVDNTDPSFVVAEIWSNMRYDGNGEPSWNQDGDRQELVNWAQAVGGPASAFDFTTKGELQAAVQGELWRMKDGNGKAPGMIGWLPEKAVTFIDNHDTGSTQNSWPFPSDKVMQGYAYILTHPGVPCIFYDHVFDWNLKQEISTLAAVRSRNEIHPGSKLKILAAEGDVYVAMIDDKVITKIGTRYDVGNLIPSDXHVVAXGNNYCIWEKSGLRVPAGRHHY

SEQ ID NO: 87 - DNA, 1443 bp, Oryza sativa
  misc_feature (198)..(198): m = adenine or cytosine
atggcgaccggacgacgcctctccatgatcctcctcctcctccttctcggcttggcttccggcgacaagattctcttccaggggttcaactgggagtcgtggaggcagagcggagggtggtacaacctgctgatggggaaggtcgacgacatcgtcgccgccggcgtcacgcacgtctggctgccgccgccgtcggamtccgtctccacgcaagatgcaatacaaagcatactttatccgttccacttcgggtattcaaaatacatactaactcagggtctatttggcataactctagcttcagaagctccagcttcagggtacatgcctgggcggctgtacgacttggatgcgtctaggtacggcacgtcgatggagttgaagtcgttgatcagcgcgctccacggcaagggcattcaggcgatcgctgacgtggtgatcaaccaccgctgcgccgactacaaggacagccgcggcatctactgcatctttgagggcggcacacctgacggccgcctcgactggggcccccacatgatctgccgcgatgatacccagttctccgacggcacaggcaacctcgacaccggcgccgacttcgccgctgcccccgacattgaccacctcaatggtgtcgtccagcgggagctcaccgactggctcctctggctcaagtctgacgaggttggcttcgatgcgtggcggctcgacttcgcaagggggtactcgccggaggtggccaaggtgtacattgaggggacaacgccggtggggttggcggtggcggagctgtgggactcgatggcgtacggcggagacgggaagccggagtacaatcaggacgcacaccggcaggcgttggtggactgggtggacagggtgggtgggacggcgtcggcggggatggtgttcgacttcacgacgaaggggatcatgaacacggcggtggagggggagctgtggcggctgatcgaccagcaggggaaggcaccgggggtgatcgggtggtggccggcaaaggctgtcaccttcgtcgacaaccacgacactggctcgacgcaacagatgtggccattcccctccgacaaggtcatgcagggctacgcctacatcctcacccatcccggcaacccatgcatcttctacgaccatttcttcgattgggggttaaaggagcagatcgcggcgctggtggcggtgaggcagcggaacggcgtgacggcgacgagctcgctcaagatcatgctgcacgacgccgacgcctacgtcgccgagatcgacggcaaggtggtgatgaagatcggctcccgctacgacgtctccagcctcatcccgcccggcttccacctcgccgcccacggcaacggctacgccgtctgggagaaaatcgccgccgccgccgccgccgccgatcatcgcacctcttccagcgcatcgctctga

SEQ ID NO: 88 - protein, 480 aa, Oryza sativa
MATGRRLSMILLLLLLGLASGDKILFQGFNWESWRQSGGWYNLLMGKVDDIVAAGVTHVWLPPPSESVSTQDAIQSILYPFHFGYSKYILTQGLFGITLASEAPASGYMPGRLYDLDASRYGTSMELKSLISALHGKGIQAIADVVINHRCADYKDSRGIYCIFEGGTPDGRLDWGPHMICRDDTQFSDGTGNLDTGADFAAAPDIDHLNGVVQRELTDWLLWLKSDEVGFDAWRLDFARGYSPEVAKVYIEGTTPVGLAVAELWDSMAYGGDGKPEYNQDAHRQALVDWVDRVGGTASAGMVFDFTTKGIMNTAVEGELWRLIDQQGKAPGVIGWWPAKAVTFVDNHDTGSTQQMWPFPSDKVMQGYAYILTHPGNPCIFYDHFFDWGLKEQIAALVAVRQRNGVTATSSLKIMLHDADAYVAEIDGKVVMKIGSRYDVSSLIPPGFHLAAHGNGYAVWEKIAAAAAAADHRTSSSASL

SEQ ID NO: 89 - DNA, 1317 bp, Oryza sativa
atgggcaagcaccatgtcaccctgtgttgtgtcgtttttgctgtgctctgcctggcgtccagcttagcacaagcccaagttctcttccagcaggggtttaactgggagtcgtggaggaagcaaggcgggtggtacaactttctgcacgagaaggtggaggagatcgccagcacgggcgccacccacgtctggctcccgccgccgtcgcactctgtctcgccgcagggttacatgccggggcggctctacgacctggacgcgtccaagtacggcacggaggcggagctcaagtcgctgatcgaggcattccacgacaagaacgtcgagtgcctcgccgacatcgtcatcaaccaccgctgcgccgactacaaggacagccgcggcgtgtactgcgtgttcgagggcggcacgcccgacggccgcctcgactggggccccgacatgatctgcagcgacgacacgcagtactccaacggccgcggccaccgcgacaccggcgccgggttcggcgccgcgcccgacatcgaccacctcaacccgcgtgtccagcgggagctcaccgactggctcaactggctcaggaccgacctcggcttcgacggctggcgcctcgacttcgccaagggctactccgcgccgctggcgaggatctacgtcgacaacaccaacccgacgttcgtcgtcggcgagatctggagctcgctcatctacaacggcgacggcaagccgtcgaccaaccaggacgcggacaggcaggagctggtgaactgggtggagggcgtcggcaagccggcgacggcgttcgacttcaccaccaagggcatcctccaggccgccgtgcagggcgagctgtggaggctccacgacggcaacggcaaggcgcccggcctcatggggtggatgcccgatcaggccgtaaccttcgtcgacaaccacgacaccggctcgacccagtcgctctggccgttcccttccgacaaggtcatgcagggctacgcctacatcctcactcaccctggcatcccatgcatcttctacgaccatgtgttcgactggaacctgcagcacgagatcgcgacgctggctgaaatccggtcaaggaacgggatccatgcggagagcacgctggacatcctcaaggccgagggggacatctacgtcgccatgatcgacggcaaggtgatcaccaagctcgggccgaggtacgacgccggcgggatcatcccctccgacttccatgtcgtggcgcacggcaacgactactgcgtctgggagaaggaaggcctcagggttcctgccggtagaaagcactattag

SEQ ID NO: 90 - protein, 438 aa, Oryza sativa
MGKHHVTLCCVVFAVLCLASSLAQAQVLFQQGFNWESWRKQGGWYNFLHEKVEEIASTGATHVWLPPPSHSVSPQGYMPGRLYDLDASKYGTEAELKSLIEAFHDKNVECLADIVINHRCADYKDSRGVYCVFEGGTPDGRLDWGPDMICSDDTQYSNGRGHRDTGAGFGAAPDIDHLNPRVQRELTDWLNWLRTDLGFDGWRLDFAKGYSAPLARIYVDNTNPTFVVGEIWSSLIYNGDGKPSTNQDADRQELVNWVEGVGKPATAFDFTTKGILQAAVQGELWRLHDGNGKAPGLMGWMPDQAVTFVDNHDTGSTQSLWPFPSDKVMQGYAYILTHPGIPCIFYDHVFDWNLQHEIATLAEIRSRNGIHAESTLDILKAEGDIYVAMIDGKVITKLGPRYDAGGIIPSDFHVVAHGNDYCVWEKEGLRVPAGRKHY

SEQ ID NO: 91 - DNA, 1386 bp, Oryza sativa
  misc_feature (1027)..(1027): r = adenine or guanine
  misc_feature (1060)..(1060): m = adenine or cytosine
atggcgagcacgcttcttgtccctgtccctgctcatcctcctcctcggcttctcctccagcttggcagccgggcaagtcctgtttcaggtaagaggtcgcccatgagttgggttgcaggctgcagtgaactgatcgtgttttgttctgagcctgagagaatggtgctcttgtgtttgatgatgatgcagggcttcaactgggagtcgtggaaggagaatggcgggtggtacaacatgctgatgggcaaggtggacgacatcgccgccgccggcatcacccacgtctggctccctccgccgtctcaatctgtcgccgaacaaggctacatgccggggcggctgtacgatctggacgcttccaagtacggcaacgaggcgcagctcaagtcgctgatcgaggcgttccacggcaagggcgtccaggtgatcgccgacatcgtcatcaaccaccgcacggcggagcacaaggacggccgcggcatctactgcctcttcgagggcgggacgcccgactcccgcctcgactggggcccgcacatgatctgccgcggcgacccctacggcgacggcaccggcaacccggacaccggcgccgacttcggcgccgcgcctgacatcgaccacctcaacaagcgcgtccagcgcgagctcatcggctggctcgactggctcaagatggacatcggcttcgacgcgtggcgcctcgacttcgccaagggctactccgccgacgtggcaaagatctacatcgacgccaccgagccgagcttcgccgtggccgagatatggacgtcgctggcgtacggcggggacggcaagccggactatgaccagaacgcgcaccggcaggagctggtcaactgggtcgaccgcgtcggcggcgccaacagcaacgccacgacgttcgacttcaccaccaagggcatcctcaacgtcgccgtggagggcgagctatggcgcctccgcggcgaggacggcaaggcgcccggcatgatcgggtggtggccggctaaggcgacgaccttcrtcgacaaccatgacaccggctcgacgcagcacmtgtggccgttcccctccgacaaggtcatgcagggctacgcatacatcctcacccaccccggcaacccatgcatcttctacgaccatttcttcgattggggtctcaaggaggagatcgagcgcctggtgtcaatcagaaaccggcaggggatccacccggcgagcgagctgcgcatcatggaagctgacagcgatctctacctcgcggagatcgatggcaaggtgatcacaaagattggaccaagatacgacgtcgaacacctcatccccgaaggcttccaggtcgtcgcgcacggtgatggctacgcaatctgggagaaaatctga

SEQ ID NO: 92 - protein, 461 aa, Oryza sativa
MASTLLVPVPAHPPPRLLLQLGSRASPVSGKRSPMSWVAGCSELIVFCSEPERMVLLCLMMMQGFNWESWKENGGWYNMLMGKVDDIAAAGITHVWLPPPSQSVAEQGYMPGRLYDLDASKYGNEAQLKSLIEAFHGKGVQVIADIVINHRTAEHKDGRGIYCLFEGGTPDSRLDWGPHMICRGDPYGDGTGNPDTGADFGAAPDIDHLNKRVQRELIGWLDWLKMDIGFDAWRLDFAKGYSADVAKIYIDATEPSFAVAEIWTSLAYGGDGKPDYDQNAHRQELVNWVDRVGGANSNATTFDFTTKGILNVAVEGELWRLRGEDGKAPGMIGWWPAKATTFLDNHDTGSTQHMWPFPSDKVMQGYAYILTHPGNPCIFYDHFFDWGLKEEIERLVSIRNRQGIHPASELRIMEADSDLYLAEIDGKVITKIGPRYDVEHLIPEGFQVVAHGDGYAIWEKI

SEQ ID NO: 93 - DNA, 2016 bp, Oryza sativa
  misc_feature (466)..(466): w = adenine or thymine
atgaagattgcactctcctttcttctccatatcctgctgttccatggctttaatcttgtgctggccgtcagtgccagcgatgaccagttcgtcttctctggcttctccggtgccaacgtcaccctcgatggcacggccacggtcacagcaggcggcctccttgagctgaccaacggcacgacccagctcaaaggccatgccttcttcccagctcccttgagcttccgcgggtcactcaacggcacggtgcaatccttctcagcctcctttgtgtttgccatcctcacatcttaccccaacctgagctgccatggcatcgccttcgttgttgcgccgagcaacaatctatccacagcactggcagcacagtacatgggactcaccaacatcgacaacaatggcaacgcgagcaaccacatttttgctgcagagattgacaccatgcagaatgttgagttccaggacwtcaacaacaaccatatcggtgttgacatcaatggcctccactcggtggaatcacactatgcaggctactacgacaagaatggaagcttccataacatgaatcttatcagcggcgatgttatgcaggcatgggtggattatgatggagatatcgctcaaattaacatcaccattggtccaattgatatgtctaaaccaggaaggtcactcatctctaccacatacaacctctcagatgttctcatggagccatcattcatcggattctcctctgcgacaggcccaatcaactctcggcactacattcttggttggagcttcggcatgaacaagcctgctccaaacattgatattgccaagttgccaaagctacctcgccttgccccaaagcctcaatccaaggtcttggtaatcctacttccaatagctatcgcagcattcatcctttctgtgggcatcgccatggtttttctagtacggagaagacagagatatgctgaactgcgtgaagattgggaggatgagtttggaccgcatcggttcgcatacaaggatttactccatgctactgatggattcagtgacaagcatattcttggagcgggagggtttggcagagtatacaaaggaattctcccaaaatcaaaattggaggttgctgtgaagagggtgtcccatgaatcaaggcaaggaatgaaagagtttgttgctgaggtagctagtattggcaggattcgacaccgcaacctcgtgcaactacttggttattgccggagaaagggtgagctccttttggtatatgactacatgtcaaatggcagtcttgacagatatttgcattatgaagggaacaagccggtcttggattgggttcagaagttccaaattatcaaagatgttgcatctggtttactctaccttcatgagaagtgggataaagttgtcattcaccgggatatcaaagcaagcaatgtactactcgataaagaaatgaatgcacgactcggcgattttggcctagcaaggctgtatgaccatggcactgatgcacacacaacgcatatggttggcaccatgggttaccttgcaccagagctaattcacacagggaaggcatcaactcttacagatgtttttgcatttggcacattccttctcgaggtcatatgtgggcaaaggcctattaaggaagatgcacacggaaatcaaattttgttagtcgattgggtacttgagcattggcacaatgaatccctacttgacacagttgatccaaggttacaaggtgattacaatgtggaagaggcatgccttgtgctaaagcttgggctgctctgctcacacccttctactaatgccaggccatgcatgcaacaagttgtggactaccttgaaggagatacaccagttccagaattggcatcaacacaccggaacttcaacgagctagcctcaatgagaaaaaaaggttttgacccatacatcatgtcatataatccatcatcaacggtgagtttcggcactgtatctgacctatcaggaggaagatga

SEQ ID NO: 94 - protein, 671 aa, Oryza sativa
  misc_feature (156)..(156): Xaa = any naturally occuring amino acid
MKIALSFLLHILLFHGFNLVLAVSASDDQFVFSGFSGANVTLDGTATVTAGGLLELTNGTTQLKGHAFFPAPLSFRGSLNGTVQSFSASFVFAILTSYPNLSCHGIAFVVAPSNNLSTALAAQYMGLTNIDNNGNASNHIFAAEIDTMQNVEFQDXNNNHIGVDINGLHSVESHYAGYYDKNGSFHNMNLISGDVMQAWVDYDGDIAQINITIGPIDMSKPGRSLISTTYNLSDVLMEPSFIGFSSATGPINSRHYILGWSFGMNKPAPNIDIAKLPKLPRLAPKPQSKVLVILLPIAIAAFILSVGIAMVFLVRRRQRYAELREDWEDEFGPHRFAYKDLLHATDGFSDKHILGAGGFGRVYKGILPKSKLEVAVKRVSHESRQGMKEFVAEVASIGRIRHRNLVQLLGYCRRKGELLLVYDYMSNGSLDRYLHYEGNKPVLDWVQKFQIIKDVASGLLYLHEKWDKVVIHRDIKASNVLLDKEMNARLGDFGLARLYDHGTDAHTTHMVGTMGYLAPELIHTGKASTLTDVFAFGTFLLEVICGQRPIKEDAHGNQILLVDWVLEHWHNESLLDTVDPRLQGDYNVEEACLVLKLGLLCSHPSTNARPCMQQVVDYLEGDTPVPELASTHRNFNELASMRKKGFDPYIMSYNPSSTVSFGTVSDLSGGR

SEQ ID NO: 95 - DNA, 474 bp, Oryza sativa
atggcttccaacaaggtagtgatctcggcgttgctcgtcgtcgtcgtctccgtgctcgcagcaacgacgacaatggcggaccaccaccaagaacaggtggtctacactcccggccagctatgtcagccaggaatcggctacccgacgtacccgctgccgcgatgccgggcgttcgtgaagcgccagtgcgtcgcccccggcacggtggacgagcaggtccggcgaggctgctgccggcagctcgccgccatcgacagcagctggtgcaggtgcgatgcgctcaaccacatgctgaggatcatctacagggagagcggcgccgccgacgctgggcaccccatggccgaggtgttccgcggctgccggagaggggacatcgagcgcgcggcggcgagcctcccggcgttctgcaacgtggacatccccaatggcgtaggcggtgtctgctactggctaccgggaactggctactag

SEQ ID NO: 96 - protein, 157 aa, Oryza sativa
MASNKVVISALLVVVVSVLAATTTMADHHQEQVVYTPGQLCQPGIGYPTYPLPRCRAFVKRQCVAPGTVDEQVRRGCCRQLAAIDSSWCRCDALNHMLRIIYRESGAADAGHPMAEVFRGCRRGDIERAAASLPAFCNVDIPNGVGGVCYWLPGTGY

SEQ ID NO: 97 - DNA, 489 bp, Oryza sativa
atggctttcatcaaggtagtgttctcggtgttgctcccggtagttgtctccatgctcgtggcaacgacgacaatggcggatcaccgtggccaggtggtttatacccccgggcagctatgcgctgccggacggggctacccgatgtacccgctgccccgctgccgggcgctggcgaagcgccagtgcgccggcggtgccgtggacgagcaagtccggcaagacatgcttgccggcaagctcgccgccattcgacgacaagcttctgtaggtgcccccgcgctgagccacatgttggttggaatgtacaaggagctcggtgcacccgctaaagggcaacccatggacgaggtgttccctggctgccggagaggcgacatgaaacgcgtggcggcgagcctcccggcgttttgcaatgtagacattcccattggcattggtggtgtttgctactggctgagttatcctatgaaccccgcgactggccactaa

SEQ ID NO: 98 - protein, 162 aa, Oryza sativa
MAFIKVVFSVLLPVVVSMLVATTTMADHRGQVVYTPGQLCAAGRGYPMYPLPRCRALAKRQCAGGAVDEQVRQDMLAGKLAAIRRQASVGAPALSHMLVGMYKELGAPAKGQPMDEVFPGCRRGDMKRVAASLPAFCNVDIPIGIGGVCYWLSYPMNPATGH

SEQ ID NO: 99 - DNA, 501 bp, Oryza sativa
atggcttccaacaaggtagtgttctcggcgttgctcctcatcatcgtctccgtgctcgccgcgacggcgaccatggcggaccaccacaaagaccaggtggtgtacagcctcggcgagcgttgtcagccaggaatgggctacccgatgtactcgctgccacgctgccgggcggtggtgaagcgccagtgcgtgggccacggcgcacccggcggcgccgtggacgagcaactccggcaggactgctgccggcagctcgccgcggtcgacgacagctggtgcaggtgctcggcgctcaaccacatggttggaggcatctacagggagctcggcgccaccgatgttgggcaccccatggccgaggtgttccccggctgccggagaggggacttggagcgcgcggcggcgagcctcccggcgttctgcaacgtggacatccccaatgggacaggtggtgtctgctactggctaggttatcctaggaccccgagaactggtcactag

SEQ ID NO: 100 - protein, 166 aa, Oryza sativa
MASNKVVFSALLLIIVSVLAATATMADHHKDQVVYSLGERCQPGMGYPMYSLPRCRAVVKRQCVGHGAPGGAVDEQLRQDCCRQLAAVDDSWCRCSALNHMVGGIYRELGATDVGHPMAEVFPGCRRGDLERAAASLPAFCNVDIPNGTGGVCYWLGYPRTPRTGH

SEQ ID NO: 101 - DNA, 931 bp, Oryza sativa
atgattacaacctcgtcgccatcgtcgcagccggtcaggctgcagcaacgatggacatgccggagcagagcggcgtctcctgctcctcttcttccaccgccggcaaccgggcgggaggagaagatgctcgccaactacgtccccgtctacgtcatgctcccgaccgcggagaacgagctggaggacgcggcggggcttcgggcgcggctgcggcggctgcggttgtatgccgatttcatgaagagcttcagagagaacatgggtgacttcttggactctggcctgatcgtggacatagaggttggcctcggccctgcaggtgagcttagatacccatcctacccagagagccaaggttgggaattccccggcatcggacagttccagcagtgttatgacaaatacctggaggaggacttcagagcggcggcgacagaggccgggcacccggagtgggagctgccgggcgacgccgctgagcgcggcgtggagggagggcgtcgaggcggcgtgcgagaacgcgctgagcaggcacgaccggcgcgggtacaaccagatgctgctgaacgcgcggcccaacggcgtcggccccgccggcggcggcggcgcgccgccgcgccgcgtcgccgccgtgacgtacctccggctgtcggacgagctcctgacggcgaccaacttccgggccttcaaggccttcgtcaggaaaatgcacgccgatcagcaggattgctgtccggatccggcccggtacgggaggcccatgaggcctctggagaggtctgggccggaggtggccatcgagcggctgctggacgcgacggcgccggagccgccgtatccgttcgacggcgagacggacatgagcgtcggcggcggcctcgccgagttgatcgactgggtgttcgacaaggtcgagtggatattctgttag

SEQ ID NO: 102 - protein, 309 aa, Oryza sativa
MITTSSPSSQPVRLQQRWTCRSRAASPAPLLPPPATGREEKMLANYVPVYVMLPTAENELEDAAGLRARLRRLRLYADFMKSFRENMGDFLDSGLIVDIEVGLGPAGELRYPSYPESQGWEFPGIGQFQQCYDKYLEEDFRAAATEAGHPEWELPGDALSAAWREGVEAACENALSRHDRRGYNQMLLNARPNGVGPAGGGGAPPRRVAAVTYLRLSDELLTATNFRAFKAFVRKMHADQQDCCPDPARYGRPMRPLERSGPEVAIERLLDATAPEPPYPFDGETDMSVGGGLAELIDWVFDKVEWIFC

SEQ ID NO: 103 - DNA, 1539 bp, Oryza sativa
  misc_feature (858)..(858): n = any nucleotide
atggccgggaacttgctagccaactatgttcaagtcaatgtcatgctccccctggatgtggtgactgtggacaacaagttcgagaaggtcgatgagacccgggcacagctgaagaagctgacggaggccggcgtcgatggcgtcatggtggacgtgtggtgggggctggtggaggggaagggccccgggtcctacgactgggaggcctacaagcagctgttcaggctggtgcaggaggccgggctgaagctgcaggccatcatgtcgttccaccagtgcggtggtaacgtcggcgacatcgtcaacatcccgatcccgcagtgggtgcgggatgtcggcgcgagcgaccccgacatcttctacaccaaccgtggtggggcgaggaacatcgagtacctcacccttggagtggatgaccagcctctcttccatggaagaactgccatccaggttttagctgatcagatgtatgctgactacatgaagagcttcagggagaacatggcagagttcttggatactggtgtcattgtggacattgaggtggggcttggtccagctggtgagatgagatacccttcctacccccagagccagggatgggtgttcccaggcataggagaattcatatgctatgataaatacctggaggcagatttcaaagcagaagcagcaaaggctgggcatcctgaatgggaattgcccgacgatgctggagagtacaatgacactcccgagaagacccggttcttcgcggataatggaacatatgtcactgagaaggggaagttcttcctcacatggtactcaaacaagctgataaaaccatggagacaagatctttggatgaagcaaacnaaggtcattctttggatgcagagtgcagctggcaatcaaatccggcattcattggtggtatagggttccaaaccatgcagctgagctcactgctggatactacaacttggacaacagagatggctacagaaccatcgcacgcatgctcacaaggcaccgtgcctgcgttaacttcacatgtgctgagatgagggattctgaacaaagctcagaggcaaagagtgcaccagaagaactagtccaacagcaggtcctgagtgctggatggagagagggcttacatgtggcatgcgaaaacgcactcggtcgatacgatgcaacagcttacaacacaatactaaggaattcaaggccgacaggcatcaacaagaatggacctcctgagcacaagctatttggattcacctacctccgattatcagacgagctgctggagggacagaactacagcacattcaaaactttcgtcaagaggatgcatgctaacctgaggattataattcaaatgttgacccattggagcctttgcaaagatcaatgccagaaatgccaattggaaagatcttacaagcagcacacccaaaattggcgccatttccctttgatgagaataccgacctgccggtttaaagatctcgctgatgcagtctgcagccactttgtgaggaacaagggaaatag

SEQ ID NO: 104 - protein, 496 aa, Oryza sativa
  misc_feature (286)..(286): Xaa = any naturally occuring amino acid
  misc_feature (300)..(300): Xaa = any naturally occuring amino acid
  misc_feature (451)..(451): Xaa = any naturally occuring amino acid
MAGNLLANYVQVNVMLPLDVVTVDNKFEKVDETRAQLKKLTEAGVDGVMVDVWWGLVEGKGPGSYDWEAYKQLFRLVQEAGLKLQAIMSFHQCGGNVGDIVNIPIPQWVRDVGASDPDIFYTNRGGARNIEYLTLGVDDQPLFHGRTAIQVLADQMYADYMKSFRENMAEFLDTGVIVDIEVGLGPAGEMRYPSYPQSQGWVFPGIGEFICYDKYLEADFKAEAAKAGHPEWELPDDAGEYNDTPEKTRFFADNGTYVTEKGKFFLTWYSNKLIKHGDKILDEANXRSFFGCRVQLAIKXSGIHWWYRVPNHAAELTAGYYNLDNRDGYRTIARMLTRHRACVNFTCAEMRDSEQSSEAKSAPEELVQQQVLSAGWREGLHVACENALGRYDATAYNTILRNSRPTGINKNGPPEHKLFGFTYLRLSDELLEGQNYSTFKTFVKRMHANLXDYNSNVDPLEPLQRSMPEMPIGKILQAAHPKLAPFPFDENTDLPV

SEQ ID NO: 105 - DNA, 1083 bp, Oryza sativa
atggataagttgccagacttgtcatatatggatagataccaacgaagaaataaagaatacatctcactcgggtgtgatattcttccgattctgaagggaagatcaccaatgcaggcttattcagacttcatgaggagctttcgagatgcttttaaagagtaccttggggctatagtgacagaagttcaaattggaatgggcccaggaggtgaacttaggtatccatcatgcccaactgagacactaagtcaagcaggcatctcatctgaactcggggagtttcaatgttatgacaagttcatgcaagcatccctgagtgctcgtgcacaacttattggcatgcaagattggggaaacggtggtccagccggcacagatggctcacgacagaaccctgaagaaactagttttttccgtgctgatggtggatgctggaatactccttatggtcggtttttccttgagtggtattcaggaatgctgcttcttcatggagagagattatgtatggttgctgatgctgtcttctctggttccggtgtgaccatcgccggaaaggtttctggaatacattggcactactatacatgttcgcacccatcggaactgactgctggttactacaacacattgttgaggaacggttatcttcctatcacccaaatgtttgctagatacaaggctgccttgtgctgcagttgctttgacctgagggatgaggagagaaataactccaagagcagcccagaaggtactctccggcaacttatggtcgccgccaagatgtgcaatctacctctgaacggcgaaaactccgtgacaaggctcgacgatacgtcgctgaatcaagtcatcagaagctcaaggctctactcaggtggcacctcagggacatctttctccttcaactatgtcagaatgaacaagagcctgtttgagtttcacaactggaacaggttcaccaagttcgtcaggcagatgtcggatgccaggacatttctagccaggctcgagttcaggagagggcagcattacctctcctcgatgtcggttgtctgggtcgtcagccgggcctgtgcatag

SEQ ID NO: 106 - protein, 360 aa, Oryza sativa
MDKLPDLSYMDRYQRRNKEYISLGCDILPILKGRSPMQAYSDFMRSFRDAFKEYLGAIVTEVQIGMGPGGELRYPSCPTETLSQAGISSELGEFQCYDKFMQASLSARAQLIGMQDWGNGGPAGTDGSRQNPEETSFFRADGGCWNTPYGRFFLEWYSGMLLLHGERLCMVADAVFSGSGVTIAGKVSGIHWHYYTCSHPSELTAGYYNTLLRNGYLPITQMFARYKAALCCSCFDLRDEERNNSKSSPEGTLRQLMVAAKMCNLPLNGENSVTRLDDTSLNQVIRSSRLYSGGTSGTSFSFNYVRMNKSLFEFHNWNRFTKFVRQMSDARTFLARLEFRRGQHYLSSMSVVWVVSRACA

SEQ ID NO: 107 - DNA, 1629 bp, Oryza sativa
atgattacaacctcgtcgccatcgtcgcagccggtcaggctgcagcaacgatggacatgccggagcagagcggcgtctcctgctcctcttcttccaccgccggcaaccgggcggcggcgtcggcggcggctcgtcgccgactcccagaagacggcggcttctctccgggtccgtgctattgccgctgagagcgaacaggcttctcctctacccgagcctccgccattgctcaccgaggaggaggaggaggaggagaagatgctcgccaactacgtccccgtctacgtcatgctcccgctgggcgtggtcaccgcggagaacgagctggaggacgcggcggggcttcgggcgcggctgcggcggctgcggcgggaggccggcgtggacggcgtcatggcggacgtgtggtggggcatcgtcgagggcgccgggccggcgcggtacgagtggcgcgcgtacagggagctgttccgcgtggcgcaggaggaaggactcaaggtgcaggccatcatgtcgttccacgcctgcggcggcaacgtcggcgacgccgtcaccatcccgctgccgcgctgggtccgcgacgtcggcgacgacgaccccgacgtgtactacacgagccccggcggcgcgaggaaccatgagtacctcaccatcggcgtggacgtccggcctctgttccacggcaggactgccatccagttgtatgccgatttcatgaagagcttcagagagaacatgggtgacttcttggactctggcctgatcgtggacatagaggttggcctcggccctgcaggtgagcttagatacccatcctacccagagagccaaggttgggaattccccggcatcggacagttccagtgttatgacaaatacctggaggaggacttcagagcggcggcgacagaggccgggcacccggagtgggagctgccgggcgacgccgccggagagtacaactacacgccggaggacacgcggttcttcgcggcggacggcggcacgtacctgaccgaggccgggaggttcttcctgacgtggtactccagcaagctgctcgagcacggcgacagggtcctcgacgaggcgaacatggcgttcctgggctgcagcctcaagctcgccgcgaaggtgtccgggatccactggtggtaccggcacccgagccacgccgcggagctcgccgcggggtactacaacgtgcccggccgcgacgggtaccgccccgtcgcgcgcatgctggcgcggcacgacggcgccgtgctcaacttcacctgcgccgagatgcgggactcggagcagccgccggaggcgatgagctcaccggagcggctggtgcggcaaggcgctgagcgcggcgtggagggagggcgtcgaggcggcgtgcgagaacgcgctgagcaggcacgaccggcgcgggattgctgtccggatccggcccggtacgggaggcccatgaggcctctggagaggtctgggccggaggtggccatcgagcggctgctggacgcgacggcgccggagccgccgtatccgttcgacggcgagacggacatgagcgtcggcggcggcctcgccgagttgatcgactgggtgttcgacaaggtcgagtggatattctgttag

SEQ ID NO: 108 - protein, 542 aa, Oryza sativa
MITTSSPSSQPVRLQQRWTCRSRAASPAPLLPPPATGRRRRRRLVADSQKTAASLRVRAIAAESEQASPLPEPPPLLTEEEEEEEKMLANYVPVYVMLPLGVVTAENELEDAAGLRARLRRLRREAGVDGVMADVWWGIVEGAGPARYEWRAYRELFRVAQEEGLKVQAIMSFHACGGNVGDAVTIPLPRWVRDVGDDDPDVYYTSPGGARNHEYLTIGVDVRPLFHGRTAIQLYADFMKSFRENMGDFLDSGLIVDIEVGLGPAGELRYPSYPESQGWEFPGIGQFQCYDKYLEEDFRAAATEAGHPEWELPGDAAGEYNYTPEDTRFFAADGGTYLTEAGRFFLTWYSSKLLEHGDRVLDEANMAFLGCSLKLAAKVSGIHWWYRHPSHAAELAAGYYNVPGRDGYRPVARMLARHDGAVLNFTCAEMRDSEQPPEAMSSPERLVRQGAERGVEGGRRGGVRERAEQARPARDCCPDPARYGRPMRPLERSGPEVAIERLLDATAPEPPYPFDGETDMSVGGGLAELIDWVFDKVEWIFC

SEQ ID NO: 109 - DNA, 3079 bp, Oryza sativa; identical to SEQ ID NO: 75
  misc_feature (62)..(62): y = cytosine or thymine
  misc_feature (183)..(183): y = cytosine or thymine
  misc_feature (215)..(215): k = guanine or thymine
  misc_feature (217)..(217): s = guanine or cytosine
  misc_feature (837)..(837): r = adenine or guanine
  misc_feature (958)..(958): s = guanine or cytosine
  misc_feature (972)..(973): m = adenine or cytosine
  misc_feature (1003)..(1003): h = adenine, cytosine, or thymine
  misc_feature (1501)..(1501): r = adenine or guanine
  misc_feature (2523)..(2523): k = guanine or thymine

SEQ ID NO: 110 - protein, 1010 aa, Oryza sativa; identical to SEQ ID NO: 76
  misc_feature (21)..(21): Xaa = any naturally occuring amino acid
  misc_feature (61)..(61): Xaa = any naturally occuring amino acid
  misc_feature (72)..(72): Xaa = any naturally occuring amino acid
  misc_feature (128)..(128): Xaa = any naturally occuring amino acid
  misc_feature (276)..(276): Xaa = any naturally occuring amino acid
  misc_feature (320)..(320): Xaa = any naturally occuring amino acid
  misc_feature (324)..(325): Xaa = any naturally occuring amino acid
  misc_feature (533)..(533): Xaa = any naturally occuring amino acid
  misc_feature (544)..(544): Xaa = any naturally occuring amino acid
  misc_feature (600)..(600): Xaa = any naturally occuring amino acid
  misc_feature (655)..(655): Xaa = any naturally occuring amino acid
  misc_feature (673)..(673): Xaa = any naturally occuring amino acid
  misc_feature (779)..(779): Xaa = any naturally occuring amino acid
  misc_feature (844)..(844): Xaa = any naturally occuring amino acid

SEQ ID NO: 111 - DNA, 2620 bp, Oryza sativa
atggagctcctgagcggggcgcgctgcgtgcagcagtaccgcgcctctcgcaagaacgccacgctcacctggcgccacgcgctcgctcctcagctcctctcctcgctcgtcttcatcttcctcatcttctgcatcgaccgcgccatccgctcccgcttctcctacaccaccgcctaccgcaacgtccccgacccggccgccctcgtcgccccgcccatcccgccctgcgaggacaagtacttcgtcagggagccctgctacgacttcctctggagcggcggcggcggcgccgggagcgcacgcgtcgccgggatcgtcgaggccatccggaggaacaaccccggcaggccgatccccgccgagaagccagatgaagttgatgcttggcttttccaaaatccaatgcgctgccctggcgccttacattttcaagttataaacgacactcagataaagtatggtattcagacgaactccactccggtagctcggagaggaacatatgaggatcctaccttcaagttccagataccacttcaaattgcagctgagagggaaatggcgaggctgctgattggaggacccaaattttagctggactgtggggttcaaggagttcgctcacccagctacagaaaccttctctactattgcccaagctgggccaactttcttccttgctattgctatgttcggattcgtttttcaaatcagtgcgttggtgacagagaaagagcttaagcttcgtcaggctatgtctatcatggggctctacgagtcagcgtattggttgtcttggttaacctgggaggctttcgtcacattactttcagcacttcttactgtgctctttgggatgatgttccagtttgacttctttctgcacaataactttgggatcctattcctcctcttctttctcttccaactgaacatgtcagctactactgttggatttgcaatattcattattggcttcttgacacaacagcttgttacaacctttgggttcccatattcaacttcctaccagaagtactaccggacaatatggtccttgtttccacctgatgtttttgcccaagccctcaatattctgggcaaggcaacggccactcctgaagacaaaggaatcagctggaatcagcggggacaatgccaatcttttgagacagattgcgtcattactattgtacatctacaaatggctcatctccacatttttcttgtggtttgtcctggcgatctactttgacaacataattccaaatgtcaatggtgttcgaaagtcagtgttctactttctgatgccttcatactggacaggaaaaggaggaggaaagttgcaagcctactgatgaggatgttattgctgaggaaaatctagtaaaacaacaagctgcaaacaatgaagtagatcctggtgttgcagttcaaatatgtggtttgcggaaaacatatccagggagttttagtatgggttgctgcagatgcaggacaactaaaccgtttcattctgtcaaaggtttatgggtgaaccttgagaaggaccagttattttgccttcttgggcccaatggagctggtaaaacaacaacaatcagttgcttgactggaatcacaccaattacaggcggcgatggttggcgatgatttatgggcattctgttcgaagcactgctgggatgtcgaatattcggaggatgataggagtctgtccgcagcagtttgacatcttgtgggatgcgctaacagctaaagagcacatggagctgtttgctagcattaagggactgcctccatcaacaatcaagtcggtgaagctcagccaggcagctaatgttagagcaggtagctacagtgggggaatgaaacgccggctaagtgttgcaatagctctaattggtgatccaaaattggtctttcttgatgaaccgactactggcatggatccaataacaaggaggcatgtctgggacatcatagaggaagcaaagaaaggaagagctattgtcttgaccacccattccatggaggaagctgacattctgagtgacaggatcgcaatcatggctaaagggaaattgcggtgcattgggacttcaattaggctgaagtcgaaatttggaacaggatatattgctaatcggcttgatgtggacccaaaagaggagagcaggacattcttaacttctttggggaactccaagacagggaacgggaattcggtatctcagacattcaactcggcctcacgacgctcgaagaagtattcctgaacatcgcaaagcaggcagaactggagagctctactgctgaaggcaccctggttactctgaacctatcatcaggttcatctattcagataccaaagggggctcgttttgtcggaattcccggaaccgagtcggaggatcacccaagaggcgtgatggttgaagtttactgggatcaagatgacaatggatcactctgcatttctggtcactctgatgaaatccctgtcccagccaatgttcagctgggtcggcccccttcgctgtctcgtagggcctcagtgggccgtggaaaccctgttgggtacatcattgatccgaatgaggtcacagcagcaagatga

SEQ ID NO: 112 - protein, 873 aa, Oryza sativa
  misc_feature (1)..(873): Xaa = any naturally occuring amino acid
MELLSGARCVQQYRASRKNATLTWRHALAPQLLSSLVFIFLIFCIDRAIRSRFSYTTAYRNVPDPAALVAPPIPPCEDKYFVREPCYDFLWSGGGGAGSARVAGIVEAIRRNNPGRPIPAEKPDEVDAWLFQNPMRCPGALHFQVINDTQIKYGIQTNSTPVARRGTYEDPTFKFQIPLQIAAEREMARLLIGGPKFXLDCGVQGVRSPSYRNLLYYCPSWANFLPCYCYVRIRFSNQCVGDRERAXASSGYVYHGALRVSVLVVLVNLGGFRHITFSTSYCALWDDVPVXLLSAQXLWDPIPPLLSLPTEHVSYYCWICNIHYWLLDTTACYNLWVPIFNFLPEVLPDNMVLVSTXCFCPSPQYSGQGNGHSXRQRNQLESAGTMPIFXDRLRHYYCTSTNGSSPHFSCGLSWRSTLTTXFQMSMVFESQCSTFXCLHTGQEKEEESCKPTDEDVIAEENLVKQQAANNEVDPGVAVQICGLRKTYPGSFSMGCCRCRTTKPFHSVKGLWVNLEKDQLFCLLGPNGAGKTTTISCLTGITPITGGDGWRXFMGILFEALLGCRIFGGXXESVRSSLTSCGMRXQLKSTWSCLLALRDCLHQQSSRXSSARQLMLEQVATVGEXNAGXVLQXLXLVIQNWSFLMNRLLAWIQXQGGMSGTSXRKQRKEELLSXPPIPWRKLTFXVTGSQSWLKGNCGALGLQLGXSRNLEQDILLIGLMWTQKRRAGHSXLLWGTPRQGTGIRYLRHSTRPHDARRSIPEHRKAGRTGELYCXRHPGYSEPIIRFIYSDTKGGSFCRNSRNRVGGSPKRRDGXSLLGSRXQWITLHFWSLXXNPCPSQCSAGSAPFAVSXGLSGPWKPCWVHHXSEXGHSSKM

SEQ ID NO: 113 - DNA, 2113 bp, Oryza sativa
atggatccgccgccgcggccgcgcccccaccgcgtcgccgtcctcctcctcctcctcctagcctcctccccggccgcccgcgcctggaagaaggacgagttccgcaactgcaaccagacccccttctgcaagcgcgcgcgcacccgcgccccgccgccgcaccgccgcttccaggtccccgacgtgtccaccttcgcgctgtcctccgacgtcgacgtcgtcgtcaagcacgatccgttcgagctgaccgtccgccgcgccggctcgggggctcccgtcctctccttcaactcccacggcctcttcgacttcgagccgctgcaggaggagggcgagacctgggaggagcaattccggagccacaccgacacgcgcccacgcggcccgcagtccatcaccttcgacgtctccttctatggcgccgatttcgtctacggcctccccgagcacacctcgctcgccctccgccccacccgcggccccggggccgaggagtcctcagggttcttctggctaaacgccgcggagatgcagatcgatgtgcttgcaccagggtggcggatcgacacgctatggatggccgaggctggtgttgttgatgccttcttcttcgttgggtctgagccgaaggatgtgatcaagcagtacatcagtgtcacaggcacaccctcgatgccacagcagtttgcggtggcgtatcaccagtgccgctggaactaccgtgatgaggaggatgttgccggagtggattctgggtttgatgagcatgatattccatatgatgtgctctggcttgacattgaacacacagatggcaagcggtactttacatgggatcattcagcatttcctaacccagaggtgatgcaagggaagatagcagataaggggaggaagatggtcaccattgtagacccacatatcaagcgagacagttcgttccacctccacgaggaagctactgctaagggatactatgtgaaagatgcgactgggaaagacttcgatgggtggtgctggcctggggcatcgtcatatcctgacatgttaaaccctgagatacgagagtggtgggctgacaagttctcctatgaaaactacaagggatcaactccaacattgtatatctggaatgacatgaatgaaccatcagtcttcaatggccctgaggtaaccatgccaagggatgcagtacattacggggatgttgagcacagagaactgcacaacgcctacggatactacttccatatggctacagcagatggacttcttaagagaagggtgcggacattggtggattctttggcaacccagaacctgatcttttggtgcgttggtaccaagtaggagcattttatcctttctttagaggtcatgctcatcatgacaccaagagacgcgagccatggttatttgggagcgaagaactgctctcatgagggaggcaattcatatgcgatattctttgctgccatactattacacactgttcagagaggctagtgtaactggtgttcctgtgatgcgtcctttatggttagaatttcctgatgacaaagagacatataataatggtgaggcttttatggttgggccaagccttttagcacaaggaatttatgaagagaaatcagtgtcagtgtaccttcctggagaggagttatggtatgacttgagaaatggatctccatacaagggtggtgtgtcacacaagctagaagtttcagaagatagcattcccagtttccaaagggcaggcgcaattgtgccaagaaaggatagattcaggcgcagttctactcagatggtgaatgatccatataccctggtgatagcgctcaatagctcaagtgcggcagaaggcgagctttatgtggatgatgggaagagttatgattatcagcaaggggcattcatccatcgtcgttttgtatttgcagacaataaggagtgcgtgattgaaagaattataatccttggggtatcatcgggatcaaagaaggctattgttgaacctggaaatcatgaagtggatattgaattggggcctccaacagtacgaaagcccaatgttcgagttgtagatgattggactataaggatagcatga

SEQ ID NO: 114 - protein, 449 aa, Oryza sativa
MDPPPRPRPHRVAVLLLLLLASSPAARAWKKDEFRNCNQTPFCKRARTRAPPPHRRFQVPDVSTFALSSDVDVVVKHDPFELTVRRAGSGAPVLSFNSHGLFDFEPLQEEGETWEEQFRSHTDTRPRGPQSITFDVSFYGADFVYGLPEHTSLALRPTRGPGAEESSGFFWLNAAEMQIDVLAPGWRIDTLWMAEAGVVDAFFFVGSEPKDVIKQYISVTGTPSMPQQFAVAYHQCRWNYRDEEDVAGVDSGFDEHDIPYDVLWLDIEHTDGKRYFTWDHSAFPNPEVMQGKIADKGRKMVTIVDPHIKRDSSFHLHEEATAKGYYVKDATGKDFDGWCWPGASSYPDMLNPEIREWWADKFSYENYKGSTPTLYIWNDMNEPSVFNGPEVTMPRDAVHYGDVEHRELHNAYGYYFHMATADGLLKRRVRTLVDSLATQNLIFWCVGTK

SEQ ID NO: 115 - DNA, 1560 bp, Oryza sativa
  misc_feature (774)..(774): s = guanine or cytosine
atggcggttgtttttgtagggatcagtgtgaacgcgacgtacgggacgttcatccgagcgatcaaggaggacatcttcttgaagtggaacgggagtaactacctcggtgtggtgtggccggggaacgtctccttcccggacttcctcaacccgcgcgccgccgagttctgggcgcgcgagatcgccgcgttccggcggaccctccccgtcgacgggctgtggatcgacatgaacgagatctccaacttcgtcgacccgccgccgctcaacgcgctcgacgacccgccgtaccgcatcgacaactccggcgtgcgccgccccatcaacaacaagacggtgccggcctccgccgtgcactacggcggcgtggccgagtacgacgcgcacaacctcttcggcttcctcgaggcgcgggccacgcacgacgcgctgctccgtgacaccggccgccgcccgttcgtgctcagccgctccacgttcgtcggctccggcaggtacaccgcgcactggaccggcgacaacttcgcgacgtgggacgacctccgctactccatcaacactatgcttagcttcggcctcttcggcatccccatgatcggtgccgacatctgcggcttcggcggaaacaccaccgaggagctctgcagccgatggattcagcttggcgcgttctacccgttctcgagggaccactcggcgatcggcaccgtccggcgagagctgtacctgtgggaatcggtggcgaggtcggcgaggaaggcgctcggcctgcgstaccggctgctcccctacttgtacacgctcatgtacgaggcgcacaccacgggcgcgcccatcgcgcggccgctcttcttctcctaccccggcgacgtcgcgacgtacggcatcgacaggcagttcctgctcggccgcggcgtgctcgtgtcaccggtgctcgagccgggcgcgaccaccgtcaccgcctacttcccggcgggacggtggttcagcctctacgacttctccctcgccgtcgccacgaagaccggcaagcgcgtgacgctgcccgcgccggcggacacggtgaacgtgcacgtcgccggcgggaacatcctgacgctgcagcagcccgcgctgacgtcgtcgcgcgtgcgccagagcgtggtccacctcctggtcgccctcgccgaggacggcacggccaccggggatctcttcttggacgacggcgagtcgccggagatggtcggggcgcggagcaggtggagccagatcaaattcagcggcgcgaccgagagcggcggcagcgtcgtcagagtgaggtcgcacgtggtgcacgactcgtacgcgccgagccggacgatggtcatcgccaaggtggtgctcatggggcttcgatcgccggtgccgcccaaggggttcgccgtttatgccaacggcgtccaggtgaacgcgagcacggcggtcgacggcggcggcggcgggaacccggagaagggagcgctgggcgtggcgcacgtcggcgggctgtcgctggtcgtcgggcaggagttcgatctcaaggtcgttatgacctattaa

SEQ ID NO: 116 - protein, 519 aa, Oryza sativa
MAVVFVGISVNATYGTFIRAIKEDIFLKWNGSNYLGVVWPGNVSFPDFLNPRAAEFWAREIAAFRRTLPVDGLWIDMNEISNFVDPPPLNALDDPPYRIDNSGVRRPINNKTVPASAVHYGGVAEYDAHNLFGFLEARATHDALLRDTGRRPFVLSRSTFVGSGRYTAHWTGDNFATWDDLRYSINTMLSFGLFGIPMIGADICGFGGNTTEELCSRWIQLGAFYPFSRDHSAIGTVRRELYLWESVARSARKALGLRYRLLPYLYTLMYEAHTTGAPIARPLFFSYPGDVATYGIDRQFLLGRGVLVSPVLEPGATTVTAYFPAGRWFSLYDFSLAVATKTGKRVTLPAPADTVNVHVAGGNILTLQQPALTSSRVRQSVVHLLVALAEDGTATGDLFLDDGESPEMVGARSRWSQIKFSGATESGGSVVRVRSHVVHDSYAPSRTMVIAKVVLMGLRSPVPPKGFAVYANGVQVNASTAVDGGGGGNPEKGALGVAHVGGLSLVVGQEFDLKVVMTY

SEQ ID NO: 117 - DNA, 1542 bp, Oryza sativa
atgaagctagagccacagctggcgatcacgatggagttgggtcgtagcagcgatcctaacatttccctgcagtcacggagacacagctacctgcaggagatccggagcttggccgtcgactcggccggcgggtggtcgccgtcgtcgtcgtctcggtcggcgagatccagtagttactacagcagcagtaagtcaagcagctctcgtcatcgctacgccccttactccatctcatcttcccggaggttggcaagacttgaagacaaaagccctcgcgacattgcgcggcggatggtccgcgacggcttcatgggcaagctgatcggggagttcggccgggcgcccagacctgctctggagaggtggttctccgagctcgacgtcggctgggtactccggtcggcgctggagaaggagaagagcgagctggccttggataagctgtacgatcttgccgtgcagaggtggacacgaggattcaccgtgatggccgaagcgctcagcgccacgcagcgccatctccaggaagagggccgttcgaccgcccaagtcgaccgggacgacgaccttcgactggtgcggttcgttgaggcgaccgtctgcaagatgcttgcctttgccaattccctagtcgccgtggccgataaaacctggaatccaatgaacaagctctcgggcctcatgaacgtgcgcagctgcatctcccacgcgtctgaaatcatcatgctctccttgaagaaggagaccctctggctaccagattcggacgaaatgctgcaaggcctgctcaacaagaccagcaatattttctcgactgcaaaagataatttgggtcaggccatacaaaggatggcaaacgatgctgaagctgttactcctgtcttgagtggcatgcattcctgggaaactttcccgcagagtgcagaaatccacaaggctactcacttaattatggactatgcaagactattttggggacacattgacgagctcaactccatactaggccaatgttggcctcatcgcatcctaaaatgcgacatcattgagcaaatgatcagcaacttaatagatcatctggagaagaaatcagagtcgttctcagaccctatcctgaggtacttgttcttgcttaacaattcctacttcatacaagatcagtatattgcaatcaccggttacagccttccatctgactcgaaaatagggataaaatattgcgactaccgaaattgctatctcaatgtctcctgggatacagtgctatcttgcctgcacattaagatgacaacgctctggttttctaaaccctcgcagctagcaagattcaaatcggaatttcagagaacatgcagacatcagaagctatggaaggttccgaaccctgagctcaggaggagcctgcgaaaagctatcattgacaaggttattactggtcctactggatacagaacatacctggaggcccatccagagcaggagaaatgtggcagtaatcaacaggacatggaagacatggtgaacgagcttttcgaaggatga

SEQ ID NO: 118 - protein, 513 aa, Oryza sativa
MKLEPQLAITMELGRSSDPNISLQSRRHSYLQEIRSLAVDSAGGWSPSSSSRSARSSSYYSSSKSSSSRHRYAPYSISSSRRLARLEDKSPRDIARRMVRDGFMGKLIGEFGRAPRPALERWFSELDVGWVLRSALEKEKSELALDKLYDLAVQRWTRGFTVMAEALSATQRHLQEEGRSTAQVDRDDDLRLVRFVEATVCKMLAFANSLVAVADKTWNPMNKLSGLMNVRSCISHASEIIMLSLKKETLWLPDSDEMLQGLLNKTSNIFSTAKDNLGQAIQRMANDAEAVTPVLSGMHSWETFPQSAEIHKATHLIMDYARLFWGHIDELNSILGQCWPHRILKCDIIEQMISNLIDHLEKKSESFSDPILRYLFLLNNSYFIQDQYIAITGYSLPSDSKIGIKYCDYRNCYLNVSWDTVLSCLHIKMTTLWFSKPSQLARFKSEFQRTCRHQKLWKVPNPELRRSLRKAIIDKVITGPTGYRTYLEAHPEQEKCGSNQQDMEDMVNELFEG

SEQ ID NO: 119 - DNA, 1546 bp, Oryza sativa
  misc_feature (149)..(149): m = adenine or cytosine
  misc_feature (218)..(218): s = guanine or cytosine
  misc_feature (220)..(220): y = cytosine or thymine
atgtcgggccccaagctcgaccgcaccccgagcatccgcgaccgcgtcgaggacaccctccacgcccaccgcaacgagctcgtcgccctcctctccaaaggtacgtgagccaggggaaggggatcctgcagccgcaccacatcctcgamgcgctcgacgaggtccagagctccggcggccgcgccctcgtcgagggccccttcctcgacgtcctccgstycgcccagcaggaggcgatcgtgctgccgccgttcgtggcgatcgcggtgcggccgcggccaggggtgtgggagtacgtccgcgtgaacgtgcacgagctcagcgtcgagcagctcaccgtgtcggagtacctccgcttcaaggaggagctcgtcgacggcatgatgctaaatgacaggatacagagtctgggaagacttcaattgacaaaagctgaggagcacttgtcgaaactcccagctgacacaccatactcacagttcgcatataacagattgtctatatactggaccaagtccgtgcattggagaatgagatggttcttaggttaaagaaacaaggccttgattttacccctaaaattcttattgtaagtgcatgtctatttccttcctcaaatgtggcatctgttaagtgtgatgttctattctatcagtagttcggatgctgctggtgagattgctgcagaactacaaggtactccagacttcataattggaaactacagtgacggtaatcttgttgcatcattgctatcttacaagatgggaattacccagctggatgacagatcaaaacccattctcttttccatggcaagacttgaccgagttaagaacataacagggttggttgaagcttatgctaaaaacgctaggctgagggagctggtaaaccttgtcgtggttgctggctataacgatgtcaagaaatccaaggacagagaagaaatcgcagagattgagaagatgcatgaacttattaagacctataacttgtttgggcagttccgttggatctcggctcagacgaacagggctcgcaatggtgagctctatcgctacatagctgatactcatggtgccttcgtgcagcagccagctttctacgaagcattcggtctcactgttgtggaggccatgacatgtggactccctacttttgcaacagtccatggtggacctgccgagattatagagcacgggatctcagggttccacatagatccttatcatccggatcaagctgcaaatctgatagctgacttcttcgaacaatgtaaacaagaccccaaccattgggttgaagtttctaatagaggcctacaacgtatatatgagaatatacatggaagatctactctgagaggttgatgacattggctggggtttatggcttctggaagtatgtctcgaagcttgagaggcgggagaccaggcgctatcttgagatgttctacatattgaagttccgtgaactggtatgcaaaaagttctgccctcttaggacccctttgaatcaaaggatttatgtaggaattttatag

SEQ ID NO: 120 - protein, 514 aa, Oryza sativa
  misc_feature (49)..(49): Xaa = any naturally occuring amino acid
  misc_feature (73)..(73): Xaa = any naturally occuring amino acid
  misc_feature (219)..(219): Xaa = any naturally occuring amino acid
  misc_feature (447)..(447): Xaa = any naturally occuring amino acid
MSGPKLDRTPSIRDRVEDTLHAHRNELVALLSRYVSQGKGILQPHHILXALDEVQSSGGRALVEGPFLDVLRXAQQEAIVLPPFVAIAVRPRPGVWEYVRVNVHELSVEQLTVSEYLRFKEELVDGMMLNDRIQSLGRLQLTKAEEHLSKLPADTPYSQFAYNRLVYILDQVRALENEMVLRLKKQGLDFTPKILIVSACLFPSSNVASVKCDVLFYQXFGCAGEIAAELQGTPDFIIGNYSDGNLVASLLSYKMGITQLDDRSKPILFSMARLDRVKNITGLVEAYAKNARLRELVNLVVVAGYNDVKKSKDREEIAEIEKMHELIKTYNLFGQFRWISAQTNRARNGELYRYIADTHGAFVQQPAFYEAFGLTVVEAMTCGLPTFATVHGGPAEIIEHGISGFHIDPYHPDQAANLIADFFEQCKQDPNHWVEVSNRGLQRIYEXYTWKIYSERLMTLAGVYGFWKYVSKLERRETRRYLEMFYILKFRELVCKKFCPLRTPLNQRIYVGIL

SEQ ID NO: 121 - DNA, 2451 bp, Oryza sativa
atgggggaagctgccggcgaccgcgtcctgagccgcctccacagcgtcagggagcgcatcggcgactccctctccgcccaccccaatgagctcgtcgccgtcttcaccaggctggttaacctcggaaagggaatgcttcaggcccaccagatcattgctgagtacaacaacgcaatctctgaggctgatcgtgagaagctgaaggacggtgcttttgaggatgtcctgaggagtgcacaggaggggattgttatctccccatgggttgcccttgccatccgcccgaggcccggtgtctgggagtatgtgagggtcaatgtgagcgagctcgctgttgagttgctgacagtccccgagtacttgcagttcaaggaacagcttgtggaagaaggcaccaacaacaactttgtgcttgagctggatttcgagccattcaatgcctccttccctcgtccttctctgtcgaagtccattggcaatggtgtgcagttcctcaacaggcatctgtcatcgaagctcttccatgacaaggagagcatgtacccactgctcaacttccttcgtgcacacaactacaagggcatgaccatgatgttgaatgacagaatccgcagtctcagtgctctccaaggtgctctgaggaaggctgaggagcatctttctggtctttcagcagacaccccttactcagaattccaccacaggttccaggaacttggtctggagaagggttggggtgactgtgccaagcgttcccaggagaccattcacctccttttggaccttcttgaggcccctgatccgtccaccctcgagaagttccttggaacaatcccaatggtgttcaatgttgtcattatgtccccacacggttacttcgcgcaagccaatgtcttgggttaccctgacactggagggcaggttgtctacattttggaccaagtccgtgctatggagaatgagatgcttctgaggatcaagcagcaaggtctcaatattacaccacgcatccttattgtcaccaggttgctccctgatgcaactggcaccacctgcggtcagcgtcttgagaaggtccttggcaccgagcacacccacatcctacgtgtgcctttcagaactgaaaatggaattgttcgcaagtggatctcacgttttgaagtctggccgtacctggaaacattcactgatgatgtcgcgcacgaaattgctggagagctccaggccaatcctgacttgatcatcggaaactacagtgacggaaaccttgttgcatgcttgcttgcacacaagatgggtgttacccattgtaccattgcccatgcgcttgagaaaaccaagtaccccaactctgacctctactggaagaagtttgaggatcactaccacttctcatgccagttcacaactgacttgattgcgatgaaccacgctgacttcatcatcaccagtaccttccaagagattgccggaaacaaggacactgttggtcagtatgagtctcacatggcattcaccatgcctggtctgtaccgtgttgtccacggtattgatgtttttgacccgaagtttaacattgtctcgcctggtgcggacatgtccatctacttcccttactctgagtctcgtaagaggctcacctccctccacccagagattgaggagttgctctacagcgaagttgacaacaacgagcacaagtttatgctgaaggacaggaacaagccaatcatcttctccatggctcgtcttgaccgtgtcaagaacttgactggtctggttgagctgtatggtcgcaaccctcgcctgcaagagctggttaaccttgtggttgtctgtggtgaccatggcaacccatctaaggacaaggaggagcaggctgagttcaagaagatgtttgaccttattgagcaatacaacttgaatggccacatccgctggatctccgcgcagatgaaccgtgtccgcaacggtgagctctaccgttacatctgcgacaccaagggtgcttttgtgcagcccgctttctacgaggcattcggtctcactgttgttgagtccatgacctgtggtctcccgacattcgcaaccgcctatggtggtccagctgagatcatcgtgaacggagtgtctggcttccacattgacccataccagggtgacaaggcctcggcgctgctcgttgagttctttgagaagtgccaggaagaccccagccactggaccaagatctcgcagggcggtcttcagcgtatcgaggagaaatacacctggaagctctactctgagaggctgatgaccctcaccggcgtctacggattctggaagtacgtctcgaacctggagaggcgtgaaacccgccgctaccttgagatgctgtatgccctcaagtaccgcaccatggctagcaccgtcccgttggccgtcgagggcgagccgtcgaacaagtga

SEQ ID NO: 122 - protein, 816 aa, Oryza sativa
MGEAAGDRVLSRLHSVRERIGDSLSAHPNELVAVFTRLVNLGKGMLQAHQIIAEYNNAISEADREKLKDGAFEDVLRSAQEGIVISPWVALAIRPRPGVWEYVRVNVSELAVELLTVPEYLQFKEQLVEEGTNNNFVLELDFEPFNASFPRPSLSKSIGNGVQFLNRHLSSKLFHDKESMYPLLNFLRAHNYKGMTMMLNDRIRSLSALQGALRKAEEHLSGLSADTPYSEFHHRFQELGLEKGWGDCAKRSQETIHLLLDLLEAPDPSTLEKFLGTIPMVFNVVIMSPHGYFAQANVLGYPDTGGQVVYILDQVRAMENEMLLRIKQQGLNITPRILIVTRLLPDATGTTCGQRLEKVLGTEHTHILRVPFRTENGIVRKWISRFEVWPYLETFTDDVAHEIAGELQANPDLIIGNYSDGNLVACLLAHKMGVTHCTIAHALEKTKYPNSDLYWKKFEDHYHFSCQFTTDLIAMNHADFIITSTFQEIAGNKDTVGQYESHMAFTMPGLYRVVHGIDVFDPKFNIVSPGADMSIYFPYSESRKRLTSLHPEIEELLYSEVDNNEHKFMLKDRNKPIIFSMARLDRVKNLTGLVELYGRNPRLQELVNLVVVCGDHGNPSKDKEEQAEFKKMFDLIEQYNLNGHIRWISAQMNRVRNGELYRYICDTKGAFVQPAFYEAFGLTVVESMTCGLPTFATAYGGPAEIIVNGVSGFHIDPYQGDKASALLVEFFEKCQEDPSHWTKISQGGLQRIEEKYTWKLYSERLMTLTGVYGFWKYVSNLERRETRRYLEMLYALKYRTMASTVPLAVEGEPSNK

SEQ ID NO: 123 - DNA, 2334 bp, Oryza sativa
atgggggaaactactggagaacgtgccctgacccgtctccacagcatgagggagcgcatcggcgattccctctccgcgcacaccaatgagcttgtggctgtcttctcaaggcttgtgaaccaaggaaagggaatgctacagccccaccagatcattgctgagtacaacgccgcaatccctgagggcgagcgtgagaagctgaaggactctgccttagaggatgtcctgaggggagcacaggaggcgattgtcatccctccatggattgcccttgccattcgcccaaggcctggtgtctgggagtatctgaggatcaatgtaagccagcttggtgttgaggagctgagtgtccctgaatacttgcagttcaaggagcagcttgtggatggaagcacccagaacaactttgtgcttgagctggactttgagccattcaatgcctccttccctcgcccatcgttgtcgaagtctattggcaatggggtgcagttcttgaacaggcacctgtcgtcaaagctgttccatgacaaagagagcatgtaccccctgctcaactttcttcgtgcgcacaactacaaagggatgaccatgatgttgaacgacaggattcgcagtctcgatgctctccaaggtgcattgaggaaggcagaaaaacatcttgcaggcattacagctgacaccccatattcagagttccatcacaggttccaagagcttggtttggagaagggttggggtgactgcgctcagcgagtgcgtgagactattcaccttctcttggaccttcttgaggcccctgagccgtccgccttggagaagttccttggaacaatcccaatggtgttcaatgttgttatcctctccccgcatggttactttgcacaggctaatgtcttggggtaccctgataccggtgggcaggttgtctacattttggatcaagtccgtgctatggagaatgagatgctgctgaggatcaagcaacaaggtctaaacatcacaccaaggattctcattgtgaccaggttgctacctgatgcgcatggcaccacatgtggccagcgccttgagaaggatgtggcacacgagatttctggagagctgcaggccacccctgacctgatcattgggaactacagtgatggcaaccttgttgcatgtttgctggcacacaagttgggtgtcactcattgtacaatcgcccatgcacttgagaaaaccaagtaccccaactccgacctttactggaagaagtttgaggatcactatcacttctcctgccagttcacagctgacctgattgcaatgaaccatgctgacttcatcatcacaagtaccttccaggagattgctggaaacaaggaaactgtggggcagtatgagtctcacatggcattcacaatgcctggcctttatcgtgttgtccatggtatcgatgtctttgaccccaagttcaacatcgtctctcctggtgctgacatgtccatctacttcccattcaccgaatcacagaagaggctcacctctctccatttagagatagaggagctactcttcagtgatgttgaaaacactgagcacaagtttgttctgaaggacaagaagaagccaatcatcttctcgatggctaggctagaccatgtcaagaatttgactggtctggttgagttgtatggtcggaaccctcgcctgcaagagctagtaaaccttgtggttgtctgtggtgaccatggcaaggaatccaaggacaaagaagagcaggctgagttcaagaagatgtttaatctgatcgagcagtacaatttgaatggccacatccgctggatctccgctcagatgaaccgtgtccgcaatggtgagctctaccgctacatctgcgacatgaggggagcctttgtgcagcccgctctctatgaggcctttgggctaactgtgattgaggccatgacctgtggtcttccaacatttgcaactgcctatggtggtccagccgagatcatcgtgcacggcgtgtctggctaccacattgatccttaccagaacgacaaggcctcggcgctgctcgtggagttctttgagaagtgtcaggaagacccaaaccactggatcaagatctcgcagggtggacttcagcgcatcgaggagaagtacacatggaagctctactctgagaggctgatgactctctccggtgtctacggtttctggaagtatgtcaccaacctcgacaggcgtgagacacgccgctacctggagatgctgtacgccctcaagtaccgcaagatggctaccaccgttccattggccattgagggagaggcctccaccaaatga

SEQ ID NO: 124 - protein, 777 aa, Oryza sativa
MGETTGERALTRLHSMRERIGDSLSAHTNELVAVFSRLVNQGKGMLQPHQIIAEYNAAIPEGEREKLKDSALEDVLRGAQEAIVIPPWIALAIRPRPGVWEYLRINVSQLGVEELSVPEYLQFKEQLVDGSTQNNFVLELDFEPFNASFPRPSLSKSIGNGVQFLNRHLSSKLFHDKESMYPLLNFLRAHNYKGMTMMLNDRIRSLDALQGALRKAEKHLAGITADTPYSEFHHRFQELGLEKGWGDCAQRVRETIHLLLDLLEAPEPSALEKFLGTIPMVFNVVILSPHGYFAQANVLGYPDTGGQVVYILDQVRAMENEMLLRIKQQGLNITPRILIVTRLLPDAHGTTCGQRLEKDVAHEISGELQATPDLIIGNYSDGNLVACLLAHKLGVTHCTIAHALEKTKYPNSDLYWKKFEDHYHFSCQFTADLIAMNHADFIITSTFQEIAGNKETVGQYESHMAFTMPGLYRVVHGIDVFDPKFNIVSPGADMSIYFPFTESQKRLTSLHLEIEELLFSDVENTEHKFVLKDKKKPIIFSMARLDHVKNLTGLVELYGRNPRLQELVNLVVVCGDHGKESKDKEEQAEFKKMFNLIEQYNLNGHIRWISAQMNRVRNGELYRYICDMRGAFVQPALYEAFGLTVIEAMTCGLPTFATAYGGPAEIIVHGVSGYHIDPYQNDKASALLVEFFEKCQEDPNHWIKISQGGLQRIEEKYTWKLYSERLMTLSGVYGFWKYVTNLDRRETRRYLEMLYALKYRKMATTVPLAIEGEASTK

SEQ ID NO: 125 - DNA, 2397 bp, Oryza sativa
  misc_feature (1005)..(1005): r = adenine or guanine
  misc_feature (2162)..(2162): r = adenine or guanine
  misc_feature (2261)..(2261): r = adenine or guanine
atggcatccaagctgagtttcaagcgaatggacagcattgccgagacaatgccagatgccctacgacaaagccggtaccagatgaagagatgcttccaaaggtacgtatcaaagggtaagaggctcttgaagaaccagcagctcatggaagagctggaaaagtcactagatgacaaagttgagaaggagaagcttgtcgaaggctttctcggttacatcatttgttcgacacaggaagcagtagtactcccaccgtttgtggcattcgctgtcagaatgaatcctggtatctgggagtacgtcaaagttcactctgatgatctttctgtcgaaggaatcacaccgtcggagtatctcaagttcaaggagaccttatacgatgaaaaatgggccaaggatgacaactcactggaagttgatttcggtgcccttgacctctcaacaccccatttgacactgccctcgtcaatagggaatgggcttcagtttgtctccaaattcatgtcctcaaagctgggtggcaaacctgaaagcatgaagcctctgttggactatttacttaccttgaattaccgtggcgagaagttgatgattaatgacaccatcgacactgtgagcaagcttcagacagcactgctacttgcagaggttttcgttagtgggctgccaaaatacacgccttacttgaagtttgaacaaagatttcaggagtgggggttagagaagggatggggtgacactgcggagaggtgcaaagaaacactaaattgtctgtctgaagtgctacaggcaccagatcctacaaacatggagaagttcttcagcagggttccatccatattcaacattgtcatcttctctattcatggttacttcggccaagaaaaggttcttggattgccggataccggtggtcaggttgtctacatattggatcaagtcagagccatggaagaggagctgcttcaaagaatcaagcagcagggtctgcacgtaacaccgaarattcttgtgcttacaagactgataccagatgccaaaggcacaaaatgcaatgtggagcttgaaccagttgaaaatacaaaatactcacatatactacgtgtgccattcaagactgaagatggcaaggatttgcgccagtgggtgtcccggtttgacatctatccttatctagagagatatgcgcagaactcttgtgccaaaattctcgacattttggagggcaaaccggacttgataattggcaactacaccgatggcaacttggtggcatccctcttgtctaacaaactatgtgtcactcagggaacaattgcacacgctctggagaagacaaagtacgaggattcagatgttaagtggagagagatggaccagaagtaccatttctcttgccaatttaccgccgatatgatttccatgaacaccagcgacttcatcatcactagcacttaccaagaaattgctgggagcaaagagaagcctggccaatatgagcaccactacgcattcacaatgccgggactatgccgctacgccacaggcattaatgtattcgacccaaagttcaacattgctgcacctggtgcagaccagtccatctacttccccttcacgcagaagcagaagcggctgacagatttacacccacagatagacgaactgctgtacagcaaggatgacactgatgaacacatagggtatctggcagacaggaacaaaccaatcatcttctcgatggcaaggcttgataaggtaaaaaacataactgggcttgtggagtggtatggccagaacaagaagctgagggacctcgtcaatctcgtcgtcgtcgcggggctcctggatgcttcgcagtccaaggatcgagaggagatcgaggagataaacaagatgcacaacctgatggacaggtaccagctcaaaggacagatccgctggatcaaggcacagactgaccgtgtccgcaacggtgagctgtaccgttgcattgcagatacaaagggtgcatttgttcagcctgcactgtatgaagcattcgggctaacggtcatcgaggcgatgaactgcgggttgccaaccttcgcaacgaaccagggcggaccagctgagataatcatcgacggtgtctctggtttccacgtaaaccccatcaacgrcagggaggcaggaatcaagattgcagatttcttccagaaatgcaaggaagacccaagttactggaacaaggtgtccactgctgggcttcagcggatctrcgagtggcaaaggctatggcaagagcaggggatcaacaggctcggcaaaccacaacaggcgtggcgcctaaaagccgcagactcggatgcaaaggatcttaaccaggttagccgggcagaagcctccagtttctga

SEQ ID NO: 126 - protein, 798 aa, Oryza sativa
MASKLSFKRMDSIAETMPDALRQSRYQMKRCFQRYVSKGKRLLKNQQLMEELEKSLDDKVEKEKLVEGFLGYIICSTQEAVVLPPFVAFAVRMNPGIWEYVKVHSDDLSVEGITPSEYLKFKETLYDEKWAKDDNSLEVDFGALDLSTPHLTLPSSIGNGLQFVSKFMSSKLGGKPESMKPLLDYLLTLNYRGEKLMINDTIDTVSKLQTALLLAEVFVSGLPKYTPYLKFEQRFQEWGLEKGWGDTAERCKETLNCLSEVLQAPDPTNMEKFFSRVPSIFNIVIFSIHGYFGQEKVLGLPDTGGQVVYILDQVRAMEEELLQRIKQQGLHVTPKILVLTRLIPDAKGTKCNVELEPVENTKYSHILRVPFKTEDGKDLRQWVSRFDIYPYLERYAQNSCAKILDILEGKPDLIIGNYTDGNLVASLLSNKLCVTQGTIAHALEKTKYEDSDVKWREMDQKYHFSCQFTADMISMNTSDFIITSTYQEIAGSKEKPGQYEHHYAFTMPGLCRYATGINVFDPKFNIAAPGADQSIYFPFTQKQKRLTDLHPQIDELLYSKDDTDEHIGYLADRNKPIIFSMARLDKVKNITGLVEWYGQNKKLRDLVNLVVVAGLLDASQSKDREEIEEINKMHNLMDRYQLKGQIRWIKAQTDRVRNGELYRCIADTKGAFVQPALYEAFGLTVIEAMNCGLPTFATNQGGPAEIIIDGVSGFHVNPINGREAGIKIADFFQKCKEDPSYWNKVSTAGLQRICEWQRLWQEQGINRLGKPQQAWRLKAADSDAKDLNQVSRAEASSF

SEQ ID NO: 127 - DNA, 2361 bp, Oryza sativa
atgcaggaggctgcagtgctccccccattcgtcgcattcgctgtcaggatgaaccctggcatctgggagttcgtcaaggtccattccgcaaatctgtccgtcgagcagatgacaccgtcggactacctcaagaacaaagaggccctggttgatgacaaatggggggcttacgatgacgactcccagctggaagtcgattttggcgccctggacctgtcgacgcctcacctcacgctgccctcctccatcggcaaaggcgcgcacttggtctccagattcatgtcttccaagctgaccgacaacaagaagccattgctggactacctgctggcgctcagccaccgcggcgacaagctgatgatcaacgacatccttgacaccgtcgacaagcttcagacagcactgcttctcgccgaggtttacgtcgccggcctgcatcccgacacaaactactccgaatttgagcagaagtacatgctgtattaccatacctggtttcaggagtggggactggagaaaggctggggtgacactgctgaaacatgcaaagaaacactaagcagtctctcggaggtgctccaagcaccggatcccatcaacatggaaaagttcttcagtacggtgccctgcgtgttcaccgttgtcatcttctccatccatggttactttggccaggagaaggtcctcggtatgccagacaccggtggtcaggttgtctacatcctggaccaagttagagctctggaagacgaactgctgcaaagaatcaagcagcagggcctgaatgccacacctaagattctcgtgctaacaaggctcataccagaagcaaagggcaccaaatgcaatgtagagttggaaccgattgaaaacacaaagcactccaacatcctccgtgtgccattcaagactgaggatggcaaagttcttccacagtgggtctcccggtttgacatctatccttacctggagagatatgcccaggattcttcagtcaagattctcgaaatattggaggggaaaccagacttggtcattggcaattacaccgacggtaatctagtagcatccctcctgacaagcaaactaggagtcactcagggaacaatagcgcatgctctagagaagacgaagtacgaggattcagacatcaagtggagagaattggaccacaagtaccatttctcatgccagtttactgctgacatgattgccatgaacactagtgacttcatcatcgctagtacctaccaagaaatagctggaagcaaagagaagcctggccagtatgagagtcactatgcattcactatgccagggctctgccgctatgccacaggcatcaacgtatttgatcccaagttcaacattgctgcaccaggtgcagatcaatctgtttactttccctttacacaaaagcagaagcgcctgactgacttacacccccaaattgaggagttgctctatagcaaagaggacaataatgagcatatagggcacctagcagacaggagtaagccaatcatcttttcaatggcaagacttgacaagataaagaacatcacagggctggtcgaatggtatggtcagaacaagaggctcagggaccttgtgaaccttgtcattgttgggggcctcctggacccttcacagtcaaaggaccgtgaggagatagaggagataaacaagatgcacagcctgataaacaagtaccagctcgtgggacagatccgttggataaaaggacagactgaccgagtgcgcaatggggaactttaccgttgcatcgcggacaccaagggagcctttgttcagcctgcactttatgaagcattcggactaacagtcatcgaggcaatgaactgcgggctgcccacctttgcaacaaatcaaggaggacctgcagagatcattgtcgatgaggtttcgggtttccatatcaacccgctcaatggcaaggaggcaagcgacaagattgctgacttctttcagaaatgcaaggaagacctcatctactggagcaagatgtccaccgctggactccaacgcatctatgagtgttacacgtggcagatctatgcaaccaaagttctgaacatggcatcaatatatggcttctggaggactctagacaaggaagaaagacaagctaaacagcactacctacacatgttctataatcttcaatttaggaagttggcaaagaatgtgccaacactgggcgaacaaccagcacaacctacagagagcgcagagcctaataggatcataccaagacccaaagaaaggcaagattgcaaccaacttacttggaccactgctcccagcctccaatttctcaacagatggagcttgaagtag

SEQ ID NO: 128 - protein, 786 aa, Oryza sativa
MQEAAVLPPFVAFAVRMNPGIWEFVKVHSANLSVEQMTPSDYLKNKEALVDDKWGAYDDDSQLEVDFGALDLSTPHLTLPSSIGKGAHLVSRFMSSKLTDNKKPLLDYLLALSHRGDKLMINDILDTVDKLQTALLLAEVYVAGLHPDTNYSEFEQKYMLYYHTWFQEWGLEKGWGDTAETCKETLSSLSEVLQAPDPINMEKFFSTVPCVFTVVIFSIHGYFGQEKVLGMPDTGGQVVYILDQVRALEDELLQRIKQQGLNATPKILVLTRLIPEAKGTKCNVELEPIENTKHSNILRVPFKTEDGKVLPQWVSRFDIYPYLERYAQDSSVKILEILEGKPDLVIGNYTDGNLVASLLTSKLGVTQGTIAHALEKTKYEDSDIKWRELDHKYHFSCQFTADMIAMNTSDFIIASTYQEIAGSKEKPGQYESHYAFTMPGLCRYATGINVFDPKFNIAAPGADQSVYFPFTQKQKRLTDLHPQIEELLYSKEDNNEHIGHLADRSKPIIFSMARLDKIKNITGLVEWYGQNKRLRDLVNLVIVGGLLDPSQSKDREEIEEINKMHSLINKYQLVGQIRWIKGQTDRVRNGELYRCIADTKGAFVQPALYEAFGLTVIEAMNCGLPTFATNQGGPAEIIVDEVSGFHINPLNGKEASDKIADFFQKCKEDLIYWSKMSTAGLQRIYECYTWQIYATKVLNMASIYGFWRTLDKEERQAKQHYLHMFYNLQFRKLAKNVPTLGEQPAQPTESAEPNRIIPRPKERQDCNQLTWTTAPSLQFLNRWSLK

SEQ ID NO: 129 - DNA, 2412 bp, Oryza sativa
atgtcgtcggccgtcgtcgcgtcatccaccacgttcctcgtcgcgctcgcctcttcggcgtcacggggagggcccaggagggggagggtggtgggcgtggccgcgccgccggccctgctttacgacggccgcgccggaaggctagccctacgggcgccgcctccgccccggcctcggcctcggcgtcgggatgcgggcgtggtgcgccgcgcggatgatggggagaacgaggcggcggtggagcgggcgggtgaggacgacgacgaggaggaggagttctcttcgggcgcctggcagccgccccgctcgcgtcgcggcggcttcggcaaggtcttgaagcggaggggcaccgtcccgcccgtcggccggtacggctccggcggtgatgcggcgagagtgcgcggggcggccgcgccggcgccggcgccgacacaggacgccgcctcaagtaagaacggagcgcttctcagcggccgcgacgacgacacacctgcctcacggaacggatcggtcgttaccggcgccgacaagcctgccgccgccacgccgccggtgaccataacgaagctcccagcgccggactcccccgtgatccttccatccgtagacaagccgcagccggagttcgtcatcccagacgcgacggcgccggcgccgccaccgcccggttcaaatcccaggtcgtccgctcctctccccaagcctgacaattcggaatttgcagaggataagagcgcaaaagttgttgagagtgctccgaagccaaaggcgactagatcttcccctattcctgcggtagaagaggagacgtgggatttcaagaaatattttgatctgaacgaaccggacgccgcggaggatggcgatgacgatgatgactgggctgattcagatgcgtcagattctgagatcgaccaggatgacgattcgggccctttggctggggagaatgtcatgaacgtgatcgtggtggctgctgaatgtgggcttggagatgttgcaggtgctttacccaaagctttggcgaggagaggacatcgtgttatggttgtggtaccaaggtacggtgattacgcggaagcccaggatgtaggaatcaggaaatactacaaggctgctggacaggatctggaagtgaaatatttccatgcatttatcgatggagttgattttgtgttcattgacgctcctctcttccgtcaccgtcaggatgacatctatggggggaacagacaggaaatcatgaagcgcatgattctgttttgtaaggctgctgttgaggttccttggcacgttccatgcggtggtgtgccctatggggatggcaacttggtgttccttgcaaacgattggcacactgcactcctgcctgtttatctgaaggcatattacagagacaatggcatgatgcagtacactcgctctgtccttgtgatacataatatcgcttaccagggccgtggcccagtagatgaattcccctacatggaattgccggagcactacctggatcacttcaagctgtacgaccccgtcggcggcgagcacgccaacatcttcggcgcgggcctgaagatggcggaccgggtggtgaccgtgagccccggctacctctgggagctgaagacgacggagggcggctggggcctccacgacatcatacgggagaacgactggaagatgaacggcatcgtgaacggcatcgactaccgggagtggaacccggaggtggacgtgcacctgcagtccgacggctacgccaactacaccgtggcctcgctggactccagcaagccgcggtgcaaggcggcgctgcagcgcgagctggggctggaggtgcgcgacgacgtgccgctgatcgggttcatcgggcggctcgacgggcagaaaggtgtggacatcatcggcgacgcgatgccgtggatcgccgggcaggacgtgcagctggtgctgctgggctccggccgccgcgacctggaggtgatgctgcagcggttcgaggcgcagcacaacagcaaggtgcgcgggtgggtggggttctcggtgaagatggcgcaccggatcacggcgggcgccgacgtgctggtcatgccgtcgcggttcgagccgtgcggcctcaaccagctctacgccatggcgtacggcaccgtccccgtcgtgcacgccgtcggcgggctgagggacaccgtgtcggcgttcgacccgttcgaggacaccggcctcgggtggacgttcgaccgcgccgagccgcacaagctcatcgaggcgctcggccactgcctcgagacgtaccgcaagtacaaggagagctggaggggtttccaggtgcgcggcatgtcgcaggacctcagctgggaccacgccgccgagctctacgaggaggtccttgtcaaggccaagtaccaatggtga

SEQ ID NO: 130 - protein, 803 aa, Oryza sativa
MSSAVVASSTTFLVALASSASRGGPRRGRVVGVAAPPALLYDGRAGRLALRAPPPPRPRPRRRDAGVVRRADDGENEAAVERAGEDDDEEEEFSSGAWQPPRSRRGGFGKVLKRRGTVPPVGRYGSGGDAARVRGAAAPAPAPTQDAASSKNGALLSGRDDDTPASRNGSVVTGADKPAAATPPVTITKLPAPDSPVILPSVDKPQPEFVIPDATAPAPPPPGSNPRSSAPLPKPDNSEFAEDKSAKVVESAPKPKATRSSPIPAVEEETWDFKKYFDLNEPDAAEDGDDDDDWADSDASDSEIDQDDDSGPLAGENVMNVIVVAAECGLGDVAGALPKALARRGHRVMVVVPRYGDYAEAQDVGIRKYYKAAGQDLEVKYFHAFIDGVDFVFIDAPLFRHRQDDIYGGNRQEIMKRMILFCKAAVEVPWHVPCGGVPYGDGNLVFLANDWHTALLPVYLKAYYRDNGMMQYTRSVLVIHNIAYQGRGPVDEFPYMELPEHYLDHFKLYDPVGGEHANIFGAGLKMADRVVTVSPGYLWELKTTEGGWGLHDIIRENDWKMNGIVNGIDYREWNPEVDVHLQSDGYANYTVASLDSSKPRCKAALQRELGLEVRDDVPLIGFIGRLDGQKGVDIIGDAMPWIAGQDVQLVLLGSGRRDLEVMLQRFEAQHNSKVRGWVGFSVKMAHRITAGADVLVMPSRFEPCGLNQLYAMAYGTVPVVHAVGGLRDTVSAFDPFEDTGLGWTFDRAEPHKLIEALGHCLETYRKYKESWRGFQVRGMSQDLSWDHAAELYEEVLVKAKYQW

SEQ ID NO: 131 - DNA, 3032 bp, Oryza sativa
atggagatggctctccggcctcaaagccttctatgccctcggagcaggctgaaggtcgtcatccggccagctagcagtgccagcggtggtggcctcgcgcagccatttcaacaccaatcaattgttagttcccctgaaaaataccgatcaattgtgggttttcatatgctcttcgaagaagagctttcacaggttgaagatgtagcaagggcaatcgcctataaaaagcagcatgaagttgatgtaatctctttgactccagatatccaggagtcaccacaggacaatatcgacccacaagaactccgaaggatgctccaagaacttgctgaccagaattgttcaatgggtaacaagcttttcgtttttccagaggcagtgaaggctaattcgacaattgatgtatatttgaatcgtaacctatcggctttggcgaatgagcctgatgtccacatcaaaggagcattcaatagttggagatggaggcctttcaccgaaagactgcacaagagtgaattgagtggggattggtggtcttgcaaactgcacatacccaaggaagcttatagattagactttgtgttcttcaatggtcgtttagtctatgataacaatgatagtaatgattttgtgctgcaagtagaaagtacaatggatgaagattcctttgaggagttcttggttgaagaaaagaaaagagaacttgagagagttgccactgaagaagctgaaaggaggaggcatgctgaagagcagcagcgaatgggagaacaaagggctgcagaacaagctgccagggaacaggctaagaaggagatagagttgaagaagaacaaattgcaaaatctgttgagttcagccagaacacatgttgataatttgtggcacatagagcctagcacatatagacaaggggacactgtcagattgtactataacagaaactcaaggccgcttatgcatagtactgagatctggatgcatggtggttgcaatagttggactgatggactctctattgttgaaagacttgtcgaatgtgatgacgaaaatggtgattggtggtatgctaatgcctgaaaaggcctttgtattggactgggtttttgctgacgggccacctggaaatgcaaggaattatgacaacaatggtcgacaagattttcatgctattcttccaaatgccatgactaacgaagaatattgggttgaagaggaaaactgtatctatacaaggcttctccacgagatcagagaacgggaggaagctattaaaataaagaaatctgagatgaaggaaaagactatgagaatgtttctactttctcagaaacacattgtttatactgaaccacttgaaatacgtgctggaacaactgtggatgttctatataatccttctaatacggtgctgaatggaaagccagaggtttggtttaggtggtcctttaaccgatggatgcatccaagtggtgttttaccacccaagaagatggtgaaaacagaagatggttgtcacttaaaagcgacaggttagtgttccatcggatgcttatatgatggactttgttttctctgagtcggaagaaggtggaatctatgacaacaggaatgggacagactatcatattcctgtttctggttccaatgcaaaggagcctcccattcatattgtccatatagcggttgagatggcacccattgcaaaggttggaggccttgctgacgttgtcacaagtctttcacgtgcaattcaagagttaggccatcatgttgaggttattctcccgaaatataattttatgaatcaaagcaatgtgaagaatttgcatgtacgtcaaagcttttctttgggtggtacagaaattaaagtgtggtttggactagttgaagacctgtctgtttacttcttggaacctcaaaatgggtatatggagggaacgatgctggcagatttggcttgttctgtcagtctgctctagagttcctccttcagagtggatcttctccacatataatacactgccatgattggtcaagtgcaccagttgcctggctatacaaggaacactatgcagaatccaggttggcaactgcccggattatatttaccatccataatcttgagtttggagcacattttattggaaaagcaatgacatactgcgacaaagccacaactacgtattcaaaggaagtcgcaggtcatggtgccatagctcctcatcgtggaaaattctatggaattctcaatggaattgatccagatatctgggatccatatactgataacttcatcccggtatagtcatgatagtcgaatacatttttatacaactaccagtccatattatacttctgaaaatgtggttgaaggcaagaatgctgcaaagagagcattgcagcagaggtttggactgcagcagactgatgtccccattgttggaatcatcactcgtctgacagcccagaagggtatccacctcattaaacatgcacttcatcggacacttgaacgcaatggacaggtggttttgcttggttcagctccagatcctcggatacagagtgatttctgcagattggctgatagtcttcatggtgaaaaccatggcagggttagactatgtttaacttatgacgagcctctctcacacctgatatatgctggctctgacttcatccttgttccatccatctttgaaccttgcggtttgactcaacttgttgccatgcgctatggatccatccctattgttcggaaaaccggagggactttacgacactgttttcgacgtagaccatgacaaagaccgggctcgagttctaggccttgaaccaaatgggttcagctttgatggagctgactgtaatggtgtggattacgccctgaacagagagcaatctcttcttggtttgaagcccgcggttggttccactccctctgcaaaagggtcatggagcaagactggtcctggaaccggcctgccctggactacattgaactgtaccattcagctcacaaattttga

SEQ ID NO: 132 - protein, 1028 aa, Oryza sativa
  misc_feature (358)..(359): Xaa = any naturally occuring amino acid
  misc_feature (430)..(436): Xaa = any naturally occuring amino acid
  misc_feature (652)..(657): Xaa = any naturally occuring amino acid
  misc_feature (661)..(661): Xaa = any naturally occuring amino acid
  misc_feature (744)..(746): Xaa = any naturally occuring amino acid
  misc_feature (788)..(788): Xaa = any naturally occuring amino acid
  misc_feature (790)..(791): Xaa = any naturally occuring amino acid
  misc_feature (984)..(984): Xaa = any naturally occuring amino acid
MEMALRPQSLLCPRSRLKVVIRPASSASGGGLAQPFQHQSIVSSPEKYRSIVGFHMLFEEELSQVEDVARAIAYKKQHEVDVISLTPDIQESPQDNIDPQELRRMLQELADQNCSMGNKLFVFPEAVKANSTIDVYLNRNLSALANEPDVHIKGAFNSWRWRPFTERLHKSELSGDWWSCKLHIPKEAYRLDFVFFNGRLVYDNNDSNDFVLQVESTMDEDSFEEFLVEEKKRELERVATEEAERRRHAEEQQRMGEQRAAEQAAREQAKKEIELKKNKLQNLLSSARTHVDNLWHIEPSTYRQGDTVRLYYNRNSRPLMHSTEIWMHGGCNSWTDGLSIVERLVECDDENGDWWYAXXMPEKAFVLDWVFADGPPGNARNYDNNGRQDFHAILPNAMTNEEYWVEEENCIYTRLLHEIREREEAIKIKXXXXXXXKSEMKEKTMRMFLLSQKHIVYTEPLEIRAGTTVDVLYNPSNTVLNGKPEVWFRWSFNRWMHPSGVLPPKKMVKTEDGCHLKATVSVPSDAYMMDFVFSESEEGGIYDNRNGTDYHIPVSGSNAKEPPIHIVHIAVEMAPIAKVGGLADVVTSLSRAIQELGHHVEVILPKYNFMNQSNVKNLHVRQSFSLGGTEIKVWFGLVEDLSVYFLEPQNGXXXXXXVYGXGNDAGRFGLFCQSALEFLLQSGSSPHIIHCHDWSSAPVAWLYKEHYAESRLATARIIFTIHNLEFGAHFIGKAMTYCDKATTXXXTYSKEVAGHGAIAPHRGKFYGILNGIDPDIWDPYTDNFIPVXSXXSNTFLYNYQSYYTSENVVEGKNAAKRALQQRFGLQQTDVPIVGIITRLTAQKGIHLIKHALHRTLERNGQVVLLGSAPDPRIQSDFCRLADSLHGENHGRVRLCLTYDEPLSHLIYAGSDFILVPSIFEPCGLTQLVAMRYGSIPIVRKTGGLYDTVFDVDHDKDRARVLGLEPNGFSFDGADCNGVDYALNXRAISSWFEARGWFHSLCKRVMEQDWSWNRPALDYIELYHSAHKF

SEQ ID NO: 133 - DNA, 2597 bp, Oryza sativa
  misc_feature (761)..(761): s = guanine or cytosine
  misc_feature (797)..(797): r = adenine or guanine
  misc_feature (831)..(831): r = adenine or guanine
  misc_feature (853)..(853): y = cytosine or thymine
  misc_feature (857)..(857): m = adenine or cytosine
atggattatatttcctgggctaaaagaattgttgatttggcacaattaaattcagtgtcaaggttttgtgcaagaattcagtgtgaaggaatagattctcttcaaaacaatttaatcattcatctgatctgctcaaagctctgtgcatctccgggtgcaacggccaggatatttattgtgcagtaaaaaaatgtcatatcccctagccacccaagaaactgctccttaagtccttataagcacatatggcattgtaatatatatgtttgagttttagcgacaatttttttaaaaacttttggtcctttttatgaacgttttaagtttcactgtctttttttttcgaattttaaatgtagcttcaaattctaatccccaatccaaattgtaataaacttcaattctcctaattaacatcttaattcatttatttgaaaaccagttcaaattcttttaggctcaccaaaccttaaacaattcaattcagtgcagagatcttccacagcaacagctagacaaccaccatgtcggctctcaccacgtcccagctcgccacctcggccaccggcttcggcatcgccgacaggtcggcgccgtcgtcgctgctccgccacgggttccagggcctcaagccccgcagccccgccggcggcgacgcgacgtcgctcagcgtgacgaccagcgcgcgcgcgacgcccaagcagcagcggtcggtgcagcgtggcagccggaggttcccctccgtcgtcgtgtacgccacsggcgccggcatgaacgtcgtgttcgtcggcgccgaratggccccctggagcaagaccggcggcctcggtracgtcctcggtggcctcccccytgcmatggctgcgaatggccacagggtcatgggtgatctctcctcggtacgaccagtacaaggacgcttgggataccagcgttgtggctgagagatcaaggttgcagacaggtacgagagggtgaggtttttccattgctacaagcgtggagtcgaccgtgtgttcatcgaccatccgtcattcctggagaaggtaggtttggggaaagaccggtgagaagatctacggacctgacactggagttgattacaaagacaaccagatgcgtttcagccttctttgccagcaggcagcactcgaggctcctaggatcctaaacctcaacaacaacccatacttcaaaggaacttatgggtgaggatgttgtgttcgtctgcaacgactggcacactggcccactggcgagctacctgaagaacaactaccagcccaatggcatctacaggaatgcaaagaggttgctttctgcatccacaacatctcctaccagggccgtttcgctttcgaggattaccctgagctgaacctctccgagaggttcaggtcatccttcgatttcatcgacgggtatgagtaagattctaagaggtatgacacgccggtggagggcaggaagatcaactggatgaaggccggaatcctggaagccgacagggtgctcaccgtgagcccgtactacgccgaggagctcatctccggcatcgccaggggatgcgagctcgacaacatcatgcggctcaccggcatcaccggcatcgtcaacggcatggacgtcagcgagtgggatcctagcaaggacaagtacatcaccgccaagtacgacgcaaccacgggcaatcgaggcgaaggcgctgaacaaggaggcgttgcaggcggaggcgggtcttccggtcgacaggaaaatcccactgatcgcgttcatcggcaggctggaggaacagaagggccctgacgtcatggccgccgccatcccggagctcatgcaggaggacgtccagatcgttcttctgggggtactggaaagaagaagttcgagaagctgctcaagagcatggaggagaagtatccgggcaaggtgagggccgtggtgaagttcaacgcgccgcttgctcatctcatcatggccggagccgacgtgctcgccgtccccagccgcttcgagccctgtggactcatccagctgcaggggatgagatacggaacggccctgtgcttgcgcgtccaccgtgggctcgtggcacacggtcatcgaaggcaagactggtttccacatgggccgtctcagcgtcgactgcaaggtggtggagccaagcgacgtgaagaaggtggcggccaccctgaagcgcgccatcaaggtcgtcggcacgccggcgtacgaggagatggtcaggaactgcatgaaccaggacctctcctggaagaggggcctgcgaagaactgggagaatgtgctcctgggcctgggcgtcgccggcagcgcgccggggatcgaaggcgacgagatcgcgccgctcgccaaggagaacgtggctgctccttgaagagcctgagatctacatatggagtgattaattaatatagcagtatatggatgagagacgaatgaaccagtggtttgtttgttgtagtgaatttgtagctatagccaattatataggctaataagtttgatgttgtactcttctgggtgtgcttaagtatcttatcggaccctgaatttatgtgtgtggcttattgccaataa

SEQ ID NO: 134 - protein, 865 aa, Oryza sativa
  misc_feature (254)..(254): Xaa = any naturally occuring amino acid
  misc_feature (266)..(266): Xaa = any naturally occuring amino acid
  misc_feature (285)..(286): Xaa = any naturally occuring amino acid
MDYISWAKRIVDLAQLNSVSRFCARIQCEGIDSLQNNLIIHLICSKLCASPGATARIFIVQXKNVISPSHPRNCSLSPYKHIWHCNIYVXVLATIFLKTFGPFYERFKFHCLFFSNFKCSFKFXSPIQIVINFNSPNXHLNSFIXKPVQILLGSPNLKQFNSVQRSSTATARQPPCRLSPRPSSPPRPPASASPTGRRRRRCSATGSRASSPAAPPAATRRRSAXRPARARRPSSSGRCSVAAGGSPPSSCTPXAPAXTSCSSAPXWPPGARPAASVTSSVASPXXWLRMATGSWVISPRYDQYKDAWDTSVVAERSRLQTGTRGXGFSIATSVESTVCSSTIRHSWRRXVWGKTGEKIYGPDTGVDYKDNQMRFSLLCQQAALEAPRILNLNNNPYFKGTYGXGCCVRLQRLAHWPTGELPEEQLPAQWHLQECKEVAFCIHNISYQGRFAFEDYPELNLSERFRSSFDFIDGYEXDSKRYDTPVEGRKINWMKAGILEADRVLTVSPYYAEELISGIARGCELDNIMRLTGITGIVNGMDVSEWDPSKDKYITAKYDATTGNRGEGAEQGGVAGGGGSSGRQENPTDRVHRQAGGTEGPXRHGRRHPGAHAGGRPDRSSGGTGKKKFEKLLKSMEEKYPGKVRAVVKFNAPLAHLIMAGADVLAVPSRFEPCGLIQLQGMRYGTALCLRVHRGLVAHGHRRQDWFPHGPSQRRLQGGGAKRREEGGGHPEARHQGRRHAGVRGDGQELHEPGPLLEEGPAKNWENVLLGLGVAGSAPGIEGDEIAPLAKENVAAPXRAXDLHMEXLINIAVYGXETNEPVVCLLXXICSYSQLYRLISLMLYSSGCAXVSYRTLNLCVWLIAN

SEQ ID NO: 135 - DNA, 1590 bp, Oryza sativa
atgcaattcatgatgccattggatacgaatgcttgtgcacaaccaatgagaagggctggtgagggtgctgggactgagaggttgatggaaagattgaatattgggggcatgactcaggagaaagcactgaggaagaggtgctttggtgatggagttactggaactgcacgatgtgtgttcacatcagatgctgatagagacactcctcatcttcggacacaatcctcccgaaagaattatgctgatgcaagccacgtttctgctgtcattttgggtggaggcactggagttcaactctttcctctgacaagcacaagggctacccccgctgtaagttcctgttggaggatgttacaggcttattgacatccctatgagcaattgcttcaatagcggaataaataaaatatttgtgatgactcagttcaattctgcttctcttaatcgccatatccatcatacataccttggtggggggatcaactttactgatgggtctgtgcagaggtattggctgctacacaaatgcctgacgaaccggctggatggttccagggtacagcagatgctatcagaaaatttatgtggatacttgagaggatcattacaatcaaaacaacattgagcacgttgtaatcttgtgtggagatcagctttacaggatgaattacatggagcttgtgcagtgcagaaacatgtcgatgacaatgctgacattaccatatcatgtgctcccatcgacgggagggaagccgagcttctgactatggactggtgaagtttgatgattcaggccgtgtgatccaatttcttgagaaaccagagggtgctgatttggaatcgatggaaagttgataccagcttcctcagctatgcaatagatgacaaacaaaagtatccctacattgcatcaatgggaatttatgtcttgaaaaaggatgttcttttagacattctgaagtcaaaatatgcacacctgcaagactttggatcagaaattctcccgagagctgttttagagcataatgtgaagaggcatgtgtcttcacagaatattgggaggatattggaacaatcaaatcattttttgatgctaacttggccctcaccgagcagcagcctccaaagttcgaattttatgatccaaaaactcctttcttcacctcacctcgatacttacctccagcaagattggagaagtgcaagagatcaaagatgcaataatctccgatggctgttcctttagtgaatgcaccattgagcattctggtcattggaatctcttcacgcgttagcatcgggtgtgaactcaagaggataccatgatgatgggtgcagatcaatatgaaactgaagaagaaacttcaaagctattgtttgaaggcaaggtcccaattggtataggcgagaacacaaagataagaggaactgtatcatcgacatgaatgctagaattggcaggaacgtgatcattgcaaacactcagagggggtccaagagtctgatcaccctgaagagggatactacataaggtctggaattgtggtgatcctgaagaatgcaaccatcaaggacgggaccgtcatataa

SEQ ID NO: 136 - protein, 531 aa, Oryza sativa
  misc_feature (169)..(169): Xaa = any naturally occuring amino acid
  misc_feature (229)..(229): Xaa = any naturally occuring amino acid
  misc_feature (250)..(250): Xaa = any naturally occuring amino acid
  misc_feature (345)..(345): Xaa = any naturally occuring amino acid
  misc_feature (404)..(404): Xaa = any naturally occuring amino acid
  misc_feature (440)..(440): Xaa = any naturally occuring amino acid
  misc_feature (476)..(476): Xaa = any naturally occuring amino acid
MQFMMPLDTNACAQPMRRAGEGAGTERLMERLNIGGMTQEKALRKRCFGDGVTGTARCVFTSDADRDTPHLRTQSSRKNYADASHVSAVILGGGTGVQLFPLTSTRATPAVVPVGGCYRLIDIPMSNCFNSGINKIFVMTQFNSASLNRHIHHTYLGGGINFTDGSVQXVLAATQMPDEPAGWFQGTADAIRKFMWILERIITIKTTIEHVVILCGDQLYRMNYMELVXVQKHVDDNADITISCAPIDGXGSRASDYGLVKFDDSGRVIQFLEKPEGADLESMKVDTSFLSYAIDDKQKYPYIASMGIYVLKKDVLLDILKSKYAHLQDFGSEILPRAVLEHNVXEACVFTEYWEDIGTIKSFFDANLALTEQQPPKFEFYDPKTPFFTSPRYLPPARLEKCKXIKDAIISDGCSFSECTIEHSVIGISSRVSIGCELKXDTMMMGADQYETEEETSKLLFEGKVPIGIGENTKIXRNCIIDMNARIGRNVIIANTSEGVQESDHPEEGYYIRSGIVVILKNATIKDGTVI

SEQ ID NO: 137 - DNA, 1520 bp, Oryza sativa
  misc_feature (99)..(99): r = adenine or guanine
atggcgatgatggcgatgggcgcggcgtcctgggccccgatcccggcgccggcgagggcggcggccgcattctatcccggccgcgatcttgcggcggcraggcggcggcttggggcggcggcgaggaggccgttcgtgttcacgccgcgtgccgtgtcggactcccggagctcgcagacgtgcctcgatccggacgccagcacggagtgttcttgggatcatccttggaggtggtgctgggacaaggctgtatccgctgacaaagaagagggcgaagccggcggtgccgttgggtgctaattacaggctcatagatatcccggtcagcaactgtctgaacagcaatgtgtcgaagatctatgtcctgacacagttcaactccgcgtcgctcaatcgtcacctctcgagggcctatggaaacaacattggtggttacaagaacgaggggtttgttgaagttcttgctgcgcagcagagcccagagaatcctaactggtttcagtcagggtactgcagatgctgtgcgacaatacttatggctatttgaggaacacaatgttatggagtttctcattttggctggagatcacctgtaccgtatggactaccaaaagttcattcaggcccacagagaaacaaatgctgatataaccgttgctgcgctgcccatggatgaagaacgtgctacagcatttggccttatgaagattgatgatgaagggaggatcattgaatttgcagaaaagccaaaaggagagaagttgaaatcaatgatgggttgacactaccatacttggccttgatactgagagggcaaaggaattgccttacattgctagtatgggaatctatgtttttagcaaagatgtgatgcttaagcttctccgtcaaaatttccctgctgcaaatgactttggaagcgaggttattcctggagcaacagaaattggaatgaggggtgcaagcttacttatatgatggttactgggaagatattggtactatagaggcattctacaatgccaacttggggataaccaagaaacctgtgccagattttagagcttctatgaccgttctgccgcaatttatacgcaacctcgatacttgcctccatcaaaagttcttgatgctgatgtgacagacagtgttattggtgaaggttgtgttattagacattgcacaatcaaccattctgtggttggactccggtcctgtatatctgaaggcgcagtgatagaggactctctgctaatgggtgcagactattatgagagacggagacggacaagaaagccctttctgagactggtggcattcccattggtattggaaagaatgcacacatcagaaaagcaataattgacaagaatgctcgtattggagaaaatgttaaggtacagataatcaatgtcgacaatatccaagaagcttcaagggagactgatggatacttcatcaaaagtggcattgtcactgtgatcaaggacgccttaatccctagcggaacagtcatataa

SEQ ID NO: 138 - protein, 505 aa, Oryza sativa
  misc_feature (353)..(353): Xaa = any naturally occuring amino acid
  misc_feature (424)..(424): Xaa = any naturally occuring amino acid
MAMMAMGAASWAPIPAPARAAAAFYPGRDLAAARRRLGAAARRPFVFTPRAVSDSRSSQTCLDPDASTSVLGIILGGGAGTRLYPLTKKRAKPAVPLGANYRLIDIPVSNCLNSNVSKIYVLTQFNSASLNRHLSRAYGNNIGGYKNEGFVEVLAAQQSPENPNWFQQGTADAVRQYLWLFEEHNVMEFLILAGDHLYRMDYQKFIQAHRETNADITVAALPMDEERATAFGLMKIDDEGRIIEFAEKPKGEKLKSMMVDTTILGLDTERAKELPYIASMGIYVFSKDVMLKLLRQNFPAANDFGSEVIPGATEIGMRVQAYLYDGYWEDIGTIEAFYNANLGITKKPVPDFXSFYDRSAAIYTQPRYLPPSKVLDADVTDSVIGEGCVIRHCTINHSVVGLRSCISEGAVIEDSLLMGADYYXETETDKKALSETGGIPIGIGKNAHIRKAIIDKNARIGENVKVQIINVDNIQEASRETDGYFIKSGIVTVIKDALIPSGTVI

SEQ ID NO: 139 - DNA, 1615 bp, Oryza sativa
atgcagttcagcagtgtgtttcccttagagggtaaagcatgcgtgagcccaataaggagaggtggtgagggctcagctagtgatagattgaagatcggggacagtagcagcatcaagcatgatagagcagtgaggaggatgtgtcttggttataggggcaccaaaaacggtgcacaatgtgtgctcacctcagatgctggcccagacactcttcatgtccgaacatcattccggaggaactttgcggatccaaatgaggttgctgctgttatattgggtggtggcaccgggactcaactttttcctctcacaagcacaagggccacgcctgctgttcctattggaggatgctataggcttatcgatatccccatgagcaactgtttcaacagtggcataaacaagatattcataatgactcaattcaactcagcatctcttaatcgtcacattcatcgtacgtaccttggtggtggaatcaactttactgatggatctgttgagaggtattagccgctacacaaatgcctggggaggctgctggttggttccagggtacagcagatgcagttagaaaatttatctgggttcttgagaggactattacaagcataaagctatagaacacattttaatcttgtcaggagatcagctttatcgtatggactacatggagcttgtgcagtgcagaaacatgttgatgacaatgctgacattactttatcatgtgctcctgttggagagagagtcgagcatctgactatggactagtgaagttcgacagttcaggccgtgtaattcaattttctgaaaaacccaagggcactgacttggaagcaatggaaagtggataccagctttctcaattttgccatagacgacccgactaaatttccctacattgcttcgatgggagtttatgtcttcaaaagagatgttcttttaaaccttctaaagtcaagatatgcagaactacatgactttgggtctgaaatcctcccaagagctttacatgagcacaatgtacaggtaaaagtttttaagcttgagcactattatgcatatgtcttcgctgactactgggaagacattggaacgatcagatcgttctttgatgcaaacatggccctttgcgagcaggcagcctcccaagtttgagttttatgatccaaaaactcccttcttcacttcacctcgatatttgccgccaacaaagtcagataaatgcagggattaaagatgcgataatttcccatggctgtttcttgcgtgaatgtaccatcgagcattcgatagttggagtccgctcacgccttaactctgcatgtgagctcaagctgcagaataccatgatgatgggtgcggatttgtacgaaactgaagatgaaatttcaagactactgtcagaaggcaaggtccccattggtgtaggggaaaacacaaagataaacaactgcatcatcgacatgaacgcgagggttggaaggaacgtggtcatcacaaacagcgagagggtgtccaagaaagtgatcggcctgaggaagggtactacataaggtcgggaatcgtggtgatcctgaagaacgcgaccatcaaggacgggaaggtcatatag

SEQ ID NO: 140 - protein, 540 aa, Oryza sativa
  misc_feature (54)..(54): Xaa = any naturally occuring amino acid
  misc_feature (70)..(70): Xaa = any naturally occuring amino acid
  misc_feature (170)..(170): Xaa = any naturally occuring amino acid
  misc_feature (201)..(201): Xaa = any naturally occuring amino acid
  misc_feature (231)..(231): Xaa = any naturally occuring amino acid
  misc_feature (251)..(251): Xaa = any naturally occuring amino acid
  misc_feature (505)..(505): Xaa = any naturally occuring amino acid
MQFSSVFPLEGKACVSPIRRGGEGSASDRLKIGDSSSIKHDRAVRRMCLGYRGXTKNGAQCVLTSDAGPXDTLHVRTSFRRNFADPNEVAAVILGGGTGTQLFPLTSTRATPAVPIGGCYRLIDIPMSNCFNSGINKIFIMTQFNSASLNRHIHRTYLGGGINFTDGSVXEVLAATQMPGEAAGWFQGTADAVRKFIWVLXEDYYKHKAIEHILILSGDQLYRMDYMELVXVQKHVDDNADITLSCAPVGXESRASDYGLVKFDSSGRVIQFSEKPKGTDLEAMKVDTSFLNFAIDDPTKFPYIASMGVYVFKRDVLLNLLKSRYAELHDFGSEILPRALHEHNVQVKVFKLEHYYAYVFADYWEDIGTIRSFFDANMALCEQQPPKFEFYDPKTPFFTSPRYLPPTKSDKCRIKDAIISHGCFLRECTIEHSIVGVRSRLNSACELKLQNTMMMGADLYETEDEISRLLSEGKVPIGVGENTKINNCIIDMNARVGRNVVITNXREGVQESDRPEEGYYIRSGIVVILKNATIKDGKVI

SEQ ID NO: 141 - DNA, 1593 bp, Oryza sativa
  misc_feature (414)..(414): w = adenine or thymine
atggcgatggcggcagccatgggcgtggcctccccctaccacgccgcccacgccgccgcatccacatcgtgcgactcgctccgcctcctcgtcgcggaaggccggccgcggcggccgcgaggggtggcctcctcctcctcctcctcctcttcggcggggaggcggaggcggccgctcgtcttctccccgcgcgcggtgtccgactccaagagctcgcagacctgcctcgacccggacgccagcacgagtgtgcttggaatcattcttggaggtggtgcagggactagattgtatcccctcaccaagaagcgtgccaagcctgccgtgcctctgggtgccaactacaggcttattgatatccctgtcagcaactgtttgaacagcaacatatccaagatctatgtgctgacacawttcaactctgcctctctgaaccgtcacctgtcaagagcctatgggaacaacattggcgggtacaagaatgaagggttcgttgaagtcctcgctgcacagcagagcccagataatcctaactggtttcagggtactgcagatgctgtaagacagtacttatggctatttgaggagcataatgttatggagtttctaattctggctggagatcacctttaccgcatggactatgaaaagttcattcaggcacacagagaaacagattctgatattactgttgctgccctgccaatggatgagaaacgtgcaactgcattcggcctcatgaaaattgacgaggaagggagaatagttgaatttgcagagaaaccaaaaggagaacaattgaaagcaatgatggttgacactaccatacttggccttgacgacgtgagggcaaaagaaatgccttatattgctagcatgggtatctatgtgattagtaaaaatgtaatgcttcagctcctccgtgaacaatttcctggagctaatgactttggaagtgaagtcattccaggtgcaacaaacatcggaatgagggtcatgtgctatatttgctgcttaagaatctatttttgttgtctgcaggtacaagcttacttgtatgatggttactgggaagacattggtaccattgaggcattctataatgcaaatctgggaataacgaaaaagcctgtaccagatttcagtttctatgaccggtctgctccaatttatacacaacctcgacacttgcctccttcgaaggttcttgatgctgatgtgacagacagtgtcattggtgaaggttgtgttattaaaaactgtaagatacaccattcagtagttggactccggtcctgcatttctgaaggcgcaataatagaggactcattactcatgggagctgactactacgagactgaagcagacaagaaactccttggtgaaaaaggtggcattcccattggtattgggaagaattgccacattagaagggcaatcatcgacaagaatgctcgtattggagataatgtgaagataatcaatgttgacaatgtccaagaagctgcaagagagactgatggatactttatcaaaagtggcattgttaccgtgatcaaggatgctttgctccctagcggaacagttatatga

SEQ ID NO: 142 - protein, 530 aa, Oryza sativa
MAMAAAMGVASPYHAAHAAASTSCDSLRLLVAEGRPRRPRGVASSSSSSSSAGRRRRPLVFSPRAVSDSKSSQTCLDPDASTSVLGIILGGGAGTRLYPLTKKRAKPAVPLGANYRLIDIPVSNCLNSNISKIYVLTHFNSASLNRHLSRAYGNNIGGYKNEGFVEVLAAQQSPDNPNWFQGTADAVRQYLWLFEEHNVMEFLILAGDHLYRMDYEKFIQAHRETDSDITVAALPMDEKRATAFGLMKIDEEGRIVEFAEKPKGEQLKAMMVDTTILGLDDVRAKEMPYIASMGIYVISKNVMLQLLREQFPGANDFGSEVIPGATNIGMRVMCYICCLRIYFCCLQVQAYLYDGYWEDIGTIEAFYNANLGITKKPVPDFSFYDRSAPIYTQPRHLPPSKVLDADVTDSVIGEGCVIKNCKIHHSVVGLRSCISEGAIIEDSLLMGADYYETEADKKLLGEKGGIPIGIGKNCHIRRAIIDKNARIGDNVKIINVDNVQEAARETDGYFIKSGIVTVIKDALLPSGTVI

SEQ ID NO: 143 - DNA, 822 bp, Oryza sativa
atggcggcgccgtcgtccctcgcgtcctccctcgttggaggcaactggaagtgcaatggaacgaaggactctgtcagcaagcttgtgactgaattgaatgctgctacacttgaacctgatgttgagatgttgtggttgcaccaccattcatttatattgatcaggttaagaactcactaactgatcgtattgaggtatctgctcagaatgtttggattggaaaaggaggagcatacactggagagatcagagtgcggagcaattggtggacattggctgccaatgggttattcttgggcattcagagcgtagacatgtcattggtgaagatgatcagagtttattgggaagaaggctgcatatgccttgagtcaaaatgtaaaggttattgcctgcataggggagctgttggaagagagagaagcagggaaaacttttgacgtctgttttaagcagatgaaggcttttgcaggtgacaattcttcatcttgaggacagtattacaaactgggcggatgtagtaattgcatatgagcctgtttgggctattggaaccgggaaagttgctactcctgagcaagctcaggaagttcatgctgctgttcgtgattggttgaaaaccaacgtgtcacctgaggttgcttccggcattcgaattatatatggagaggttctgtaaatgcagccaattgtgccgagctagcaaagaaagaagatattgacggcttccttgttggtggtgcctctttgaagtttgcagggtccggattttgccactattatcaactcggtgacttccaagaaagttgcagcctgatgtaa

SEQ ID NO: 144 - protein, 272 aa, Oryza sativa
  misc_feature (42)..(42): Xaa = any naturally occuring amino acid
  misc_feature (84)..(84): Xaa = any naturally occuring amino acid
  misc_feature (113)..(113): Xaa = any naturally occuring amino acid
  misc_feature (165)..(165): Xaa = any naturally occuring amino acid
  misc_feature (224)..(224): Xaa = any naturally occuring amino acid
MAAPSSLASSLVGGNWKCNGTKDSVSKLVTELNAATLEPDVXDVVVAPPFIYIDQVKNSLTDRIEVSAQNVWIGKGGAYTGEIXSAEQLVDIGCQWVILGHSERRHVIGEDDXEFIGKKAAYALSQNVKVIACIGELLEEREAGKTFDVCFKQMKAFAGDNSSSXDSITNWADVVIAYEPVWAIGTGKVATPEQAQEVHAAVRDWLKTNVSPEVASGIRIIYGXGSVNAANCAELAKKEDIDGFLVGGASLKFAGPDFATIINSVTSKKVAA

SEQ ID NO: 145 - DNA, 822 bp, Oryza sativa; identical to SEQ ID NO: 143

SEQ ID NO: 146 - protein, 272 aa, Oryza sativa; identical to SEQ ID NO: 144
  misc_feature (42)..(42): Xaa = any naturally occuring amino acid
  misc_feature (84)..(84): Xaa = any naturally occuring amino acid
  misc_feature (113)..(113): Xaa = any naturally occuring amino acid
  misc_feature (165)..(165): Xaa = any naturally occuring amino acid
  misc_feature (224)..(224): Xaa = any naturally occuring amino acid

SEQ ID NO: 147 - DNA, 683 bp, Oryza sativa
atggctgccaggaagttcttcgtcggcggcaactggaaatgcaatgggacaggggaggacgtgaagaagatcgtcaccgtcctcaacgaggccgaggtgccctccgaggacgtcgtcggaggtggtggtgagcccgccgttcgtgttcctgccgcaggtgaagggtttgctccggccggacttctccgtcgccgcgcagaattgctgggtgcgcaagggcggcgccttcactggcgagatcagagtgccgagatgttggtgaacctgcaggtgccttgggtgattctgggacactctgagcggagagcgctgatgggcgaatcaagtgattttgttgctgacaaaattgcgtacgcactttcccaaggtatcaaggtaattgcttgcattggtgagacccttgaacagagagaagcaggaacaacgatggaagttgttgcagcgcaaactaaagctattgcaggttcatgatggtctgagaaagtggcttgtgactaatgttagtcctgcagttgctgaatcaaccaggattatttacagagggctccgtaaatggagcaaactgcaaagaacttgctgctaaacctgatgttgatggattccttgttggaggagcttcattgaagctgcagcctgaatttgtggacatcatcaagtctgctaccgtcaagtcttctgcttag

SEQ ID NO: 148 - protein, 226 aa, Oryza sativa
  misc_feature (81)..(81): Xaa = any naturally occuring amino acid
MAARKFFVGGNWKCNGTGEDVKKIVTVLNEAEVPSEDVVEVVVSPPFVFLPQVKGLLRPDFSVAAQNCWVRKGGAFTGEIXSAEMLVNLQVPWVILGHSERRALMGESSDFVADKIAYALSQGIKVIACIGETLEQREAGTTMEVVAAQTKAIAVHDGLRKWLVTNVSPAVAESTRIIYRGSVNGANCKELAAKPDVDGFLVGGASLKLQPEFVDIIKSATVKSSA

SEQ ID NO: 149 - DNA, 1078 bp, Oryza sativa
atgtcggcctactgcggcaagtacaagggacgagctcatcaagaacgctgcctacattggcactcctggcaagggtatccttgctgcggatgagtccactggcaccattggcaagcgcttcgccagcatcaacgtcgagaacgttgaggagaaccgccgctccctccgcgagctcctcttctgcacccctggcgccctccagtacctcagcggcgtgatcctcttcgaggagaccctgtaccagaagaccaaggatggcaagcccttcgtcgatgtcctcaaggagggtggtgtcctcccgggcatcaaggtggacaagggcacaatcgaggttgccggcaccgagaaggagaccaccacccagggccatgatgaccttggcaagagatgcgccaagtactacgaggctggtgcccgcttcgccaagtggcgcgccgtcctcaagatcggccccaacgagccgtcgcagctcgccattgatctgaatgcgcagggcctcgctcgctacgccatcatctgccaggagaacgggctggtgccgatcgtcgagcccgagatccttgttgatggccctcacgacatcgaccgctgcgcctacgtctcggaggtggtcctcgctgcgtgctacaaggccctcaacgagcaccatgtcctcctcgagggtaccctcctcaagcccaacatggtcaccccaggctctgacgccaagaaggtgtctcccgaggtcatcgctgagtacaccgtccgcaccctccagaggaccgtccccgctgccgtgcccgccatcgtcttcctgtccggtgggcagagcgaggaggaggcgaccctgaacctcaacgccatgaacaagctcagcaccaagaagccgtggtcgctgtccttctccttcggccgtgccctccagcagagcacgctcaaggcctggtccggcaaggcggagaacattgagaaggccagggcggccttccttaccaggtgcaaggccaactccgaggctaccctcggtacatacaagggtgacgctgtcctcggcgagggcgcctccgagagccttcacgtcaaggactacaagtactga

SEQ ID NO: 150 - protein, 358 aa, Oryza sativa
MSAYCGKYKDELIKNAAYIGTPGKGILAADESTGTIGKRFASINVENVEENRRSLRELLFCTPGALQYLSGVILFEETLYQKTKDGKPFVDVLKEGGVLPGIKVDKGTIEVAGTEKETTTQGHDDLGKRCAKYYEAGARFAKWRAVLKIGPNEPSQLAIDLNAQGLARYAIICQENGLVPIVEPEILVDGPHDIDRCAYVSEVVLAACYKALNEHHVLLEGTLLKPNMVTPGSDAKKVSPEVIAEYTVRTLQRTVPAAVPAIVFLSGGQSEEEATLNLNAMNKLSTKKPWSLSFSFGRALQQSTLKAWSGKAENIEKARAAFLTRCKANSEATLGTYKGDAVLGEGASESLHVKDYKY

SEQ ID NO: 151 - DNA, 2547 bp, Oryza sativa
  misc_feature (39)..(39): r = adenine or guanine
  misc_feature (124)..(124): m = adenine or cytosine
  misc_feature (126)..(126): y = cytosine or thymine
  misc_feature (1725)..(1725): m = adenine or cytosine
atgccggagagcaacggcgccgcgtgcggcgcggcggaraaggtgaagccggcggccagccccgcgtcggaggagccggccgccatcgccggtaacatctccttccacgcgcagtacagccccmayttctcgccgctcgcgttcggccccgagcaggccttctactccaccgccgagagcgtccgcgatcacctcgtccagcagagatggaacgagacgtacttgcatttccacaagacggatccgaagcagacgtactacctctccatggagtacctgcagggccgcgcgctcaccaacgccgtcggcaacctcggcatcaccggcgcctacgcggaggccgtgaagaagttcgggtacgagctcgaggccctcgtcgggcagcaggaaaaagatgcagctctgggaaatggtggcttgggtaggctcgcatcttgctttttggattcgatggcaacactaaatttgcctgcttggggatatggtctgcggtaccgatatggtctattcaaacaatgcatcaccaaggaaggccaggaagaaattgctgaagattggcttgagagaagttcagcccatgggaaattgtcaggcatgacattgtatacccaatcagattttttggccacgttgagattttgccagatggatctcgtaaatgggtggggggagaagttctcaatgctttagcatatgatgtgccaattcctgggtacaagacaaaaaatgcaatcagtcttcgtctttgggacgcaaaagctagtgcggaggattttaacttatttcaattcaatgatggccagtatgagtccgctgctcaacttcatgctagggcacaacagcagatatgtgccgttctctatcccggtgatgctacagaagaaggaaagcttctcagactgaagcaacagtatttcctttgcagtgcatcgcttcagcaggatatttttttcaggtttaaagaaaggaaagctgacagagtttctgggaaatggagtgagttccctgcaaaagttgctgttcaattgaatgacactcacccaactcttgcgattcctgagctgatgaggctactcatggatgtggagggacttggttgggatgaagcatgggatatcacaaataaaacaattgcctacaccaatcacactgttcttcctgaagcccttgagaaatggtcgcagattgtaatgaggaaattacttccacgacacatggaaattatcgaggaaattgacaagcgggttcaaggaaatggtaatctccacccggaaggaaatggagggaaagattgactccatgagaatcttagacaactcaaatcctcagaagccagtagtgcgcatggcaaatttgtgcgtagtgtctgcccatacgggtgaatggagtggctgagttacacagcaacattttgaaggaagagctttttgcagactatctctctatatggcccaacaaatttcagaacaaaacaaatggaattacacctcgtagatggctccgtttctgcaacccagagttgagtgaaatagtaacaaaatggctaaaaacagatcagtggacaagcaaccttgatcttcttaccggacttcggaaatttgcagatgatgaaaagcttcatgctgagtgggcatcagctaagttggctagcaaaaaacgcctagccaagcatgtgttggatgtgacaggtgttacaatcgacccaaatagcctttttgatatacmaattaaacgcattcatgagtacaagagacagctgctaaacattttgggagctgtttacagatacaagaagttaaagagggaatgagtgcagaggagagacaaaaagttacgccacgcactgtcatgatagggggaaaagcattcgcgacttacaccaatgccaaaagaatagtaaaattggtaaatgatgttggtgctgtggtgaacaatgatcctgatgttaataaatacctaaagaggtggtgttcattcccaactacaatgtatctgtggccgaggtgctcattcctgggagtgaactgtcacagcacatcagtaccgcaggcatggaagcaagtggaacgagtaatatgaaattctctctgaatggttgtgttatcattggtactcttgatggagctaatgttgagataagagaggaagtgggacaagaaaatttcttcctttttggtgccaaggcagatcaagttgctgggctgaggaaggatagagagaatggcttggttcaaaccagacccacgttttgaagaagccaagcagcttataaggagtggtgcttttggcacctatgactatgctcccctcttggattctcttgaaggaaattctggatttggtcgtggtgattatttcctcgttggctatgatttcccaagctatattgatgcacaggcccaggttgatgaagcctacaaggataagaaaaaatggatcaagatgtctatactgaacacagctggaagtggcaaattcagcagcgaccgtactatcgctcagtatgcaaaggaaatatggggcattactgctagccctgtctcctaa

SEQ ID NO: 152 - protein, 848 aa, Oryza sativa
  misc_feature (42)..(42): Xaa = any naturally occuring amino acid
MPESNGAACGAAEKVKPAASPASEEPAAIAGNISFHAQYSPXFSPLAFGPEQAFYSTAESVRDHLVQQRWNETYLHFHKTDPKQTYYLSMEYLQGRALTNAVGNLGITGAYAEAVKKFGYELEALVGQQEKDAALGNGGLGRLASCFLDSMATLNLPAWGYGLRYRYGLFKQCITKEGQEEIAEDWLERSSAHGKLSGMTLYTQSDFLATLRFCQMDLVNGWGEKFSMLXHMMCQFLGTRQKMQSVFVFGTQKLVRRILTYFNSMMASMSPLLNFMLGHNSRYVPFSIPVMLQKKESFSDXSNSISFAVHRFSRIFFSGLKKGKLTEFLGNGVSSLQKLLFNXMTLTQLLRFLSXXGYSWMWRDLVGMKHGISQIKQLPTPITLFFLKPLRNGRRLXXGNYFHDTWKLSRKLTSGFKEMVISTRKEMEGKIDSMRILDNSNPQKPVVRMANLCVVSAHTGEWSGXVTQQHFEGRAFCRLSLYMAQQISEQNKWNYTSXMAPFLQPRVEXNSNKMAKNRSVDKQPXSSYRTSEICRXXKASCXVGISXVGXQKTPSQACVGCDRCYNRPKXPFXYTNXTHSXVQETAAKHFGSCLQIQEVKEGMSAEERQKVTPRTVMIGGKAFATYTNAKRIVKLVNDVGAVVNNDPDVNKYLKRWCSFPTTMYLWPRCSFLGVNCHSTSVPQAWKQVERVIXNSLXMVVLSLVLLMELMLRXERKWDKKISSFLVPRQIKLLGXGRIERMAWFKPDPRFEEAKQLIRSGAFGTYDYAPLLDSLEGNSGFGRGDYFLVGYDFPSYIDAQAQVDEAYKDKKKWIKMSILNTAGSGKFSSDRTIAQYAKEIWGITASPVS

SEQ ID NO: 153 - DNA, 1185 bp, Oryza sativa; identical to SEQ ID NO: 35

SEQ ID NO: 154 - protein, 393 aa, Oryza sativa; identical to SEQ ID NO: 36

SEQ ID NO: 155 - DNA, 1299 bp, Oryza sativa
atggcgtctgctactctcctcaagtcatctttccttcccaagaagtctgaatggggtgccacccgccaggctgccgcccccaagccggtgactgtctccatggttgtccgcgctggtgcctacgacgatgagcttgtcaagaccgcggaaaaccattgcatcaccaggaaggggtatccttgccatggatgagtcgaacgcgacctgcggtaagaggcttgcgtcaattggccttgagaacaccgaggccaaccgccaggcttaccggaccctccttgtcaccgcaccgggcttgggacagtacatctccggtgctatcctcttcgaggagactctgtaccagtcaactgtagatggcaagaagattgtcgacatcctcactgagcagaaaatcgttccaggtatcaaggtcgacaagagggtcttgtgccccttgctggctccaacaacgagtcatggtgccaaggtctcgacggccttgcctcgcgcgaggcggcatactaccagcagggcgctcgcttcgccaagtgaggcgcactgttgtcagcatccccaacggcccatctgaactcgccgtgaaggaggctgcctggggccttgcccgctacgccgccatttctcagaggacaacgggctggtgccgattgtcgagcctgagatcctcctcgacggtgagcatggcatcgacaggaccttcgaggtggcgcagaaggtgtgggcggagaccttcttctacatggccgagaacaatgtgattgttcgaggggcatcctcctcaagccaagcatggtgacacccggtgccgagtgcaaggacagggccacccctgagcaagtatctgactacaccctcaagctcctccacagaaggatcccccctgccgtccccggcatcatggttcttgtcgggtgggcagtcggaggtggaggcgacgcagaacctgaacgcgatgaaccaggggcccaacccgtggcacgtgtcgttctcgtacgcgagggcgctgcagaacacgtgcctcaagacgtggggcgggcagccggagaacgtgaaggcggcgcaggacgcgctgctcctccgcgccaaggccaactcgctggcgcagctcggcaagtacaccagcgacggcgaggccgccgaggccaaggagggcatgttcgtcaagaactacgtctactaatccgatccaatccaatcaagacagtgaacctgctgctgctgctgctacgtactacagctactgctatactgctagtacctcgagggcactgtagccagtgtgtcgtcacagttacaggttga

SEQ ID NO: 156 - protein, 391 aa, Oryza sativa
  misc_feature (140)..(140): Xaa = any naturally occuring amino acid
  misc_feature (177)..(177): Xaa = any naturally occuring amino acid
  misc_feature (209)..(209): Xaa = any naturally occuring amino acid
MASATLLKSSFLPKKSEWGATRQAAAPKPVTVSMVVRAGAYDDELVKTAKTIASPGRGILAMDESNATCGKRLASIGLENTEANRQAYRTLLVTAPGLGQYISGAILFEETLYQSTVDGKKIVDILTEQKIVPGIKVDKXGLVPLAGSNNESWCQGLDGLASREAAYYQQGARFAKXRRTVVSIPNGPSELAVKEAAWGLARYAAISQXDNGLVPIVEPEILLDGEHGIDRTFEVAQKVWAETFFYMAENNVLFEGILLKPSMVTPGAECKDRATPEQVSDYTLKLLHRRIPPAVPGIMFLSGGQSEVEATQNLNAMNQGPNPWHVSFSYARALQNTCLKTWGGQPENVKAAQDALLLRAKANSLAQLGKYTSDGEAAEAKEGMFVKNYVY

SEQ ID NO: 157 - DNA, 1254 bp, Oryza sativa
atggccattggccaccaccacccaaggggagcgcaagcgcagaggacaagagcgcctcctcgtctggtctgcttcggccccccgctcgctcctcctgccgaagcactcactcttcggctgctcatcctcctcctcctcctcagacaggagcagaaccagacttgccacgaaggatttgataatctaggggttcgggacgagatgatattttcagtcagcttatttggtagttcccaccagtccattcacaaactttacaggaaatgctggtcaagtaactcacattctacactgaatgtgctttcacttgcaaaaactgtgggtcaaagtatgagaatgaagaggatacgtgtcaagcctcatgccactgacctgaagaatcgcccccaggcccatgaggataatgtgttctacaaattggtttataggctccctgaaaacctcagctggctgttggcgtcaccagaaatggctagaagaccaccctcaaagaagaaactaaagaaggaagaaatggtaagtagtaatcaatttggtgtgatcttggagtgggaaggagttgttgtggaagatgatgatccagatttggagcctcgagtttggtacgtgttatcacttgaagaggcaaagtcttttcctccagatgcagtgctgaaggaaattgaggggatgaggactgatcaggctattttagaagtcttacattggtcagaagatccacaagaagtacaaaggctggcagcacgcaaggaggtaatatataaaacattacgtggtagattctaccaactgcgaccaggtgttcttgatttcctgaacacccttgtggattttgacattccaatagcaatcacaactcctcgcccacggttgagcctagaagaagggataaaagctgttggtcttcaaggctactttgatgctatagtggcagcagaggatttctgccgagggaaacccgagggggagatgtttgaggtcacagcagggcaacttggtcttgagcctgatgtttgtcttgtgctgggtaactcaaattcgacaatagaatctgcgcatactgctgggatgaggtgtgttgcggttgcaagccgataccctgcctatgagctccaagcagcaaaccatgttgtaagatggcttgatcagctatctgtcgctgacctgcaaaggattgccaatggcgagattcttgggctcaggggcagaagatctgacatggacatggacatggagattgtgatcgaggagtga

SEQ ID NO: 158 - protein, 417 aa, Oryza sativa
MAIGHHHPRGAQAQRTRAPPRLVCFGPPLAPPAEALTLRLLILLLLLRQEQNQTCHEGFDNLGVRDEMIFSVSLFGSSHQSIHKLYRKCWSSNSHSTLNVLSLAKTVGQSMRMKRIRVKPHATDLKNRPQAHEDNVFYKLVYRLPENLSWLLASPEMARRPPSKKKLKKEEMVSSNQFGVILEWEGVVVEDDDPDLEPRVWYVLSLEEAKSFPPDAVLKEIEGMRTDQAILEVLHWSEDPQEVQRLAARKEVIYKTLRGRFYQLRPGVLDFLNTLVDFDIPIAITTPRPRLSLEEGIKAVGLQGYFDAIVAAEDFCRGKPEGEMFEVTAGQLGLEPDVCLVLGNSNSTIESAHTAGMRCVAVASRYPAYELQAANHVVRWLDQLSVADLQRIANGEILGLRGRRSDMDMDMEIVIEE

SEQ ID NO: 159 - DNA, 1889 bp, Oryza sativa
  misc_feature (53)..(53): k = guanine or thymine
  misc_feature (97)..(97): s = guanine or cytosine
  misc_feature (120)..(120): y = cytosine or thymine
atgatttggttggtttcgttgatcgtttgggtgatttttgttgtttttttttkggttgttgcagctagcagccatggcgtcgtcggcgctcatctgsgacaccgagcagtggaagggccyccagcaggcgcatgttggggagattcagaaaacgcacctgcgccatctgatgcatgatgttgagcgctgcaaggcaatgacagctgagtatgaaggcatatatctggattactcgaggcagcgtgcgactggcgaaaccatggagaagctgtttaaattggccgagggctgcaaagctcaaggagaagattgagaagatgtttagaggtgacaagagataaatagcacagagaacagatcagtgcttcatgtagctctaagggctccaagagacgaagtaataaatagcaatggggtcaatgtggttcccgaagtttggggtgtaaaagataaaatcaagcaattttcagaaacttttaggagtggatcatggggttggggcaactggtaaagcattgacaaatgttgtgtcagtaggaataggtggtagctttcttggtcctctgtttgtgcatgctgccctccagacaggatccagaagctgcagaatctgccaaagggcggcaattaagatttcttgcaaatgtcgaccctgttgatgttgcacgaagcatcaaagatttagatcctgaaacaacacttggttgtggtagtctcgaagaccttcacaacagctgaaacaatgttaaatgctcgaactcttaaggagtggattgtctcttctcttggcctgatgctgttgcaaaacatatgattgctgtcagtaccaatcttgagttgaagcttgtggagaagtttggaattgacccgaaaaatgcttttgcattttgggactgggttggtggccgctatagtggtttgcagtgctgttggtgtcctgcccttatctcttcagtatggctttccgattgttcagaaatttttggagggtgcagccagcatcgacaaacactttcgttcatcttcatttgagaaaaatattcctgtactccttggtttgctgagtgtgtggaatgtttcatttctcggatatccagctagaggcaatactgccctattcccaagcacttgagaaatttgcaccgcatattcagcagagcttcctttttcccagttccattattgcattctcgtccggttatttctaagtcataacatgtgctcattatggtgtaaagcttagcatggagagtaatggaaagggtgtctccattgatggtgttcaactgccctttgagagtggtgaaattgattttggtgaacctggaaccaatgggcaacacagcttctatcaattaatccatcagcagggaagagttattccttgtgattttatcggtgtcgtaaaaagccagcaacctgtttacttgaaaggtaggggaaattgtgagcaatcatgacgaattgatgtccaatttctttgctcagcctgatgcgcttgcttatggaaagagactcctgaacaactgcatagcgagaaagtacctgaacatcttatccctcataagacttttcagggcaaccgaccatcgcttagtttattgctgccctcattatctgcttatgagattggacagcagcttttagccatctacgagcaccggattgcagtccagggtttcctatggggaataaactcatttgaccagtggggagtggaactgggcaagtctcttgcctctcaagtgagaaaatctctacatgcatcccgcgttgaaggaaagcctgtcctggggtttaacagcagtactacaagtttgctgacacgatatcttgctgtacgttctttgatagttcatcataatttattatccatgttatataattaa

SEQ ID NO: 160 - protein, 629 aa, Oryza sativa
  misc_feature (18)..(18): Xaa = any naturally occuring amino acid
  misc_feature (33)..(33): Xaa = any naturally occuring amino acid
MIWLVSLIVWVIFVVFFXVVAASSHGVVGAHLXHRAVEGPPAGACWGDSENAPAPSDAXCXALQGNDSXVXRHISGLLEAACDWRNHGEAVXIGRGLQSSRRRLRRCLEVTRDKXHREQISASCSSKGSKRRSNKXQWGQCGSRSLGCKRXNQAIFRNFXEWIMGLGQLVKHXQMLCQXEXVVAFLVLCLCMLPSRQDPEAAESAKGRQLRFLANVDPVDVARSIKDLDPETTLGCGSLEDLHNSXNNVKCSNSXGVDCLFSWPDAVAKHMIAVSTNLELKLVEKFGIDPKNAFAFWDWVGGRYSGLQCCWCPALISSVWLSDCSEIFGGCSQHRQTLSFIFIXEKYSCTPWFAECVECFISRISSXRQYCPIPKHLRNLHRIFSRASFFPVPLLHSRPVISKSXHVLIMVXSLAWRVMERVSPLMVFNCPLRVVKLILVNLEPMGNTASINXSISREELFLVILSVSXKASNLFTXKVGEIVSNHDELMSNFFAQPDALAYGKRLLNNCIARKYLNILSLIRLFRATDHRLVYCCPHYLLMRLDSSFXPSTSTGLQSRVSYGEXTHLTSGEWNWASLLPLKXENLYMHPALKESLSWGLTAVLQVCXHDILLYVLXXFIIIYYPCYII

SEQ ID NO: 161 - DNA, 1582 bp, Oryza sativa
atggcggtcaccgccgacgtgaagctcgagggcctccgcgccgccaccgacaagctcgaccagatcaggtgcgagttcatcccactccacttccactggatctacccgcgcgatcgtttcgtccccattttttttgtgctgattttttctgtgtgtgtgttttttttgctgttgtttttgttgcagcgagaacgagaagtccgggttcatcagcctcgtttcgcgctacctcaggagtggagtaagatccagaccccgaccgacgaggtggtggttccctacgacacgctctcggctgctcccgaaggagacgaagaagctgctcgacaaactcgtcgtgctcaagctcaatggaggcctcgggacgaccatgggctgcactggtcccaatctgtcattgaagtccgcaatggctttacgtttctagaccttattgtgattcaaattgagctgaacaagaagtatggatgcaatgtccctttgcttctaatgaactcattcaacactcatgatgacacacagaagaagattgttgagaagtactccaactccaacattgaaattcacactttcaaccagttcatgcagagccaatatcctcgcattgttactgaagacttcttgccacttccaagcaaggggaagactggcaaggatggctgggtatcccccaggccatggtgatgtgttcccctccttgaataacagtggaaaacttgataccttgttggcacagtctcagggcaaggagtatgtctttgtcgcgaactcggacaacttgggtgctattgttgacatcagtatcctaatcttaaaccacctgatccataaccagaacgagtactgtatggaggttactcctaaaacattggctgatgttaaaggtggtaccctcatctcttacgaagggagagttcaggtgcagctgttggagattgctcaagtccctgatgagcatgtgaatgaattcaagtcaattgagaagttcaagatcttcaataccaacaacctgtaaaacaggtgggtgaacttgaaggccatcaagaggctggtagaagctgaagcacttaagatggaaatcattcctaaccctaaggaagttgatggtgtgaaagttctgcaactcgaaactgcagctggagcagccattcggttctttgaaaaagcaattggcattaatgttccccgctcgagatttctgccagtcaaggctacatctgatttgttgcttgtacagcagtctgatttgtacaccttggtcgatggctttgtcatccgcaacccagccagaacaaacccatcaaacccttcgattgagcttggacctgagttcaagaagctggcccggtttaagtcaatccccagcattgtcgagcttgacaccttgaaggtctctggtgatgtctggttcggctctggagttacactcaagctacagggtaaggtgaccatcaccgccaagtcagggaagttggagatcccagatggagccgtgcttgagaacaaggacatcaacggtccggaggatctttgaggctgctcacggaaaccttccagatatatttagctgagcgttttgtaa

SEQ ID NO: 162 - protein, 527 aa, Oryza sativa
  misc_feature (1)..(527): Xaa = any naturally occuring amino acid
MAVTADVKLEGLRAATDKLDQIRCEFIPLHFHWIYPRDRFVPIFFVLIFSVCVFFLLLFLLQREREVRVHQPRFALPQEWSKIQTPTDEVVVPYDTLSAAPEGDEEAARQTRRAQAQWRPRDDHGLHWSQSVIEVRNGFTFLDLIVIQIELNKKYGCNVPLLLMNSFNTHDDTQKKIVEKYSNSNIEIHTFNQFMQSQYPRIVTEDFLPLPSKGKTGKDGWVSPRPWXCVPLLEXQWKTXYLVGTVSGQGVCLCRELGQLGCYCXHQYPNLKPPDPXPERVLYGGYSXNIGXCXRWYPHLLRRESSGAAVGDCSSPXXACEXIQVNXEVQDLQYQQPVKQVGELEGHQEAGRSXSTXDGNHSXPXGSXWCESSATRNCSWSSHSVLXKSNWHXCSPLEISASQGYIXFVACTAVXFVHLGRWLCHPQPSQNKPIKPFDXAWTXVQEAGPVXVNPQHCRAXHLEGLWXCLVRLWSYTQATGXGDHHRQVREVGDPRWSRAXEQGHQRSGGSLRLLTETFQIYLAERFV

SEQ ID NO: 163 - DNA, 1239 bp, Oryza sativa
  misc_feature (201)..(201): y = cytosine or thymine
  misc_feature (250)..(250): k = guanine or thymine
  misc_feature (289)..(289): r = adenine or guanine
atgcagagcgcggcggccgtcgggctcctccggccatgcggcgccaccaccgccgccgccccgctccagctccgcaaccctagcccccggggcttcggcgtcggagtcgggcagccgctgctcccgccgagggggctccgcctctccgccgtggccccgcgcgcgggcatctccgcccggcgcatcgggctcgtgccggcytccccggagcaggaggatgagcggcggcggggcgcacgcgacgtggccktggcggcgacagcggcggcggcggttaaggcagggccgraggaggttggagggctcgcgaagacgctgcagctcggcgcgctcttcgggctgtggtacctcttcaacatctacttcaacatctacaacaagcagcaggttttgaaggtttttccataccccataaacatcacaaatgtccagtttgctgtcggcactgtcattgctctgttcatgtggattaccggtatccttaaaagaccaaagatctccggtgcgcagcagcttgctgctatccttcctctcgctatggtccacaccatgggcaatcttttcacgaacatgagccttggaaaggttgcagtgtcatttacacatactatcaaggctatggagcctttcttttcagttctgctttcagcacttttcctcggagagagatgcctactccttttgttgtattgtctcttgttccaattgttggtggtgtggcattggcatctcttactgaagcttcatttaactggggctggattttggagtgcaatggcctcaaatgtcaccttccagtcaaggaatgtgttgagcaagaagcttatggtgaagaaggagaggaatctctggacaacattaccctcttctcaatcattacagtgatgtcattcttcctcttggccccagtaaccttgctaacagagggtgtcaaaggtctgaacttaaaacagatatacacaaggtcactgattgctgcgttctgtttccatgcataccaacagaaggtgtcgtacatgatcctggcaagagtgtcccctgttactcactcggtgggtaactgtgtcaagcgagtggtggtcattgtgacatccgttctgttcttccgcacccctgtttcgcctatcaactctctggaggaaccggagtcgctcttgccggagttttcctgtactcacaattgaagcggcttaaacccaagcccaagactgcctgattgtgtcttggtatctatcgtga

SEQ ID NO: 164 - protein, 414 aa, Oryza sativa
  misc_feature (84)..(84): Xaa = any naturally occuring amino acid
  misc_feature (97)..(97): Xaa = any naturally occuring amino acid
  misc_feature (222)..(222): Xaa = any naturally occuring amino acid
  misc_feature (280)..(280): Xaa = any naturally occuring amino acid
  misc_feature (313)..(321): Xaa = any naturally occuring amino acid
MQSAAAVGLLRPCGATTAAAPLQLRNPSPRGFGVGVGQPLLPPRGLRLSAVAPRAGISARRIGLVPASPEQEDERRRGARDVAXAATAAAAVKAGPXEVGGLAKTLQLGALFGLWYLFNIYFNIYNKQQVLKVFPYPINITNVQFAVGTVIALFMWITGILKRPKISGAQQLAAILPLAMVHTMGNLFTNMSLGKVAVSFTHTIKAMEPFFSVLLSALFLGXEMPTPFVVLSLVPIVGGVALASLTEASFNWAGFWSAMASNVTFQSRNVLSKKLMVKKXEESLDNITLFSIITVMSFFLLAPVTLLTEGVKXXXXXXXXXGLNLKQIYTRSLIAAFCFHAYQQKVSYMILARVSPVTHSVGNCVKRVVVIVTSVLFFRTPVSPINSSGGTGVALAGVFLYSQLKRLKPKPKTA

SEQ ID NO: 165 - DNA, 3015 bp, Oryza sativa
  misc_feature (85)..(85): s = guanine or cytosine
  misc_feature (179)..(179): r = adenine or guanine
  misc_feature (195)..(195): s = guanine or cytosine
  misc_feature (201)..(201): r = adenine or guanine
atggcgaccgcctcggcgccgctgcagctggccaccgcgtcccggccgctccccgtcggcgtcggctgcggcggaggaggaggcsgggggctccacgtgggtggtgcccgcggcgggggcgcggcaccggcgcggcggcggctggcggtgcggagcgtgcgagcgatcggggcgtgcargggtcggtgtcgcccsaggaartgcgtaaaatgggaactctgttatttctgtatctcgaataagatttcaagtgtgctaaattccatcgattcctctaccattgcatcaaacattaagcaccatgcggagttcacaccagtattctctccagagcacttttcacctctgaaggcttaccatgcaactgctaaaagtgttcttgatactctgataatgaactggaatgcaacatatgactattacgacagaacaaatgtgaagcaagcgtattacctgtccatggagtttttacagggaagagctctcactaatgccgttggtaaccttgagctaactggacaatacgcagaagcactacaacaacttggacacagcctagaggatgttgctacccaggagccagatgctgcccttgggaatggtggtctaggccggttagcttcctgtttcttggattctctggcaaccctaaattatccagcatggggatatggacttcgatacaaacatggcctctttaagcaaatcataacgaaggatggtcaggaggaggtagctgaaaattggctcgagatgggaaatccttgggagattgtaagaaccgatgtctcctatcctgtgaagttctatggtaaagtggttgaaggcactgatgggaggatgcactggattggaggagaaaatatcaaggttgttgctcatgatatccctattcctggctacaagactaaaactaccaacaatcttcgtctttggtcaacaacagtgccatcacaagatttcgatttggaagcttttaatgctggagatcatgcaagtgcatatgaagctcatctaaatgctgaaaagttagcacatggtgaaatggcttttgaagtggaagccccatacctcaaggcatgtgaattgtatttattaccgcattcttatttgtgtcattcattctcaattatgatatgtcacgtactgtatcctggggacgaatcaccagaggggaaagttcttcgcctgaagcaacaatatacattatgctcagcctcactacaggatattattgctcgtttcgagaggagagctggtgattctctcagctgggaggacttcccctctaaagttgcagtgcagatgaatgacactcacccaacactgtgcattcctgagttgatgagaatattgattgatgttaaagggttaagctggaatgaggcttggagtatcacagaaagaactgtggcatacacaaaccacacggtgcttcctgaagctctggagaagtggagcttggacataatgcagaaacttcttcctcggcatgttgaaatcatagaaaaaattgatggggagctgatgaacatcattatctcaaaatacggaacagaagatacttcactgttaaaaaagaagattaaagaaatgagaatcttagacaacattgacctaccagattctattgccaaactatttgtgaaaccaaaagagaaaaaagaatctcctgctaaattgaaagagaaattgcttgtcaaatctctggagcctagtgttgtggttgaggagaaaactgtgtccaaagtagagataaacgaggactctgaggaggtggaggtagactctgaagaagttgtggaggcagaaaacgaggactctgaggatgagttagatccatttgtaaaatcagatcctaaattacctagagttgtccgaatggctaacctttgtgttgttggtgggcattcggttaatggtgtggctgcgattcacagcgagattgtgaaagaagatgtattcaacagcttttatgagatgtggcccgctaaatttcaaaataaaacaaatggagtgactcctagacgttggattcggttttgtaatcctgaattaagtgcaatcatttcaaaatggataggatctgatgattgggttttgaacactgataaacttgctgaattaaagaagtttgctgatgatgaggatctgcaatcagaatggcgtgctgctaaaaaggctaacaaggtgaaggttgtttctctcataagagaaaaaacaggatatatcgtcagtccagatgcaatgtttgacgttcaggtgaaaaggatccatgagtataagcgacagctgctaaatatccttggaattgtctaccgctacaagaagatgaaagaaatgagtgcaaaagacagaataaatagctttgttccaagggcaaagaggatagtgaagtttattacagatgttgcagctactgtaaatcatgatccagaaattggagatctattgaaggttgtatttattccagattataatgttagtgttgctgaggcgctaatccctgccagtgaattgtctcagcatatcagtactgctggaatggaagctagtggaaccagcaacatgaagtttgcaatgaatggatgtatccttattggaactttggatggtgctaatgtggaaatcagagaggaggttggagaggaaaactttttcctttttggtgctgaggcacatgaaattgctggtttaaggaaagagagagcccagggaaagaggttaagagatttgtccgcagttggggtctttggaacttacaactacgatgacttgatgggttctctggaaggaaatgaaggttatgggcgtgcagactattttcttgttggtaaagatttccccagctacattgaatgccaggagaaggttgataaagcataccgcgatcagaaactatggacaaggatgtcaatcctcaacacagccagttcctccaagttcaacagcgaccggacgattcacgagtacgccaaggacatctgggacatcaagcctgtcatcctgccctag

SEQ ID NO: 166 - protein, 1004 aa, Oryza sativa
MATASAPLQLATASRPLPVGVGCGGGGGGGLHVGGARGGGAAPARRRLAVRSVRAIGACRGRCRPRKCVKWELCYFCISNKISSVLNSIDSSTIASNIKHHAEFTPVFSPEHFSPLKAYHATAKSVLDTLIMNWNATYDYYDRTNVKQAYYLSMEFLQGRALTNAVGNLELTGQYAEALQQLGHSLEDVATQEPDAALGNGGLGRLASCFLDSLATLNYPAWGYGLRYKHGLFKQIITKDGQEEVAENWLEMGNPWEIVRTDVSYPVKFYGKVVEGTDGRMHWIGGENIKVVAHDIPIPGYKTKTTNNLRLWSTTVPSQDFDLEAFNAGDHASAYEAHLNAEKLAHGEMAFEVEAPYLKACELYLLPHSYLCHSFSIMICHVLYPGDESPEGKVLRLKQQYTLCSASLQDIIARFERRAGDSLSWEDFPSKVAVQMNDTHPTLCIPELMRILIDVKGLSWNEAWSITERTVAYTNHTVLPEALEKWSLDIMQKLLPRHVEIIEKIDGELMNIIISKYGTEDTSLLKKKIKEMRILDNIDLPDSIAKLFVKPKEKKESPAKLKEKLLVKSLEPSVVVEEKTVSKVEINEDSEEVEVDSEEVVEAENEDSEDELDPFVKSDPKLPRVVRMANLCVVGGHSVNGVAAIHSEIVKEDVFNSFYEMWPAKFQNKTNGVTPRRWIRFCNPELSAIISKWIGSDDWVLNTDKLAELKKFADDEDLQSEWRAAKKANKVKVVSLIREKTGYIVSPDAMFDVQVKRIHEYKRQLLNILGIVYRYKKMKEMSAKDRINSFVPRAKRIVKFITDVAATVNHDPEIGDLLKVVFIPDYNVSVAEALIPASELSQHISTAGMEASGTSNMKFAMNGCILIGTLDGANVEIREEVGEENFFLFGAEAHEIAGLRKERAQGKRLRDLSAVGVFGTYNYDDLMGSLEGNEGYGRADYFLVGKDFPSYIECQEKVDKAYRDQKLWTRMSILNTASSSKFNSDRTIHEYAKDIWDIKPVILP

SEQ ID NO: 167 - DNA, 3069 bp, Oryza sativa
atgatgagggagggagatgcatgtgttgcacttctaagaagcaagctccatggccttgtcgagaggaaccgcagtctggaagaggagaacaagcaattgagacatcaagtcagtcgtctaaaaggccaagtatcctcccttgaaggccaggatactgatagaaagatgctctggaagaagctggataattcttccactggcaacagctacctcaaggaaaagcagtttgttcccaacaatgatgcaaaggaagccatggatctcaacagcacgtcgtgttacagcaggcagcaattctccagggcacctctggtgagatcaagagcaccaagggttccaaatccaccgccaagtccaacctacacccaaccaatagtaaatgcaagaaaggaaggaggcatggctcctcctccaccgccacctcccctaccttccagattgctgaagagcactaaggcagtgcaaagggtgcctgatgtagtcgagttataccggttattggttagaagagaaggcaaaaatgatgcaaagtctggatccatgggaattccggcagctactaatagccgagagatgatcggggagatagagaacaaatcagcttatgtgttagctattaaatcagatgtagaaaatcagagtgaattcattaacttcctggcagtggaggtaaagaatgcggcatacaaagaaatagctgatgttgaagagtttgtgaagtggcttgatggggaactatcttaccttgtggacgaaagagcagtgctcaagcatttcccaaactggccagagaagaaagcagataccatgagagaagcagcattcacctaccgagatctgaagaatctggaatcagaagcatcgtcattccacgatgacaggagagttgccacacctatggctctcaagcgcatgcaagctctgcaggataaaattgaacaaggtattcataatactgagcgagcaagggacagtgcaagtggaagatacaaggatcttaagatcccgtgggaatggatgcttgactctggaatcataagccaactaaagatggcttcattgaagctagcaagagaattcatgaaccgcgttgtgaatgcactgaagtccgacccattcacaaatgacgaagaactgcttctccaaggtgtccgctttgccttccgcatacatcagatgaaactgctgatggagcaggaggaggccgccttgtgggggctcagctgcatcgtcccttctcaccgcgaaacactggatttcaagtttctattgaagccaaaagacaatagctcacattgcattgttgaggaggggccagaccgatcactagtttgtggaagtaatgaggtggaaattaggaatgcattgtttaaattcaatgatgagacaggtgtggttgaatgcaagattttcgtggagacagaaattttgtccccatttgacctagctgctagttggaaggctcatcaggagcatctccagccgagggtgcgaggggcccatgatgtcattatgaatgccgattctgaatccagggccaagaatggcttcgcttctggtttggagcttgatttagagaagtatgtagttccgacaccaaacatgggctcggatgttgtttatgcagctaacttgactgaaaatccccgctcgttattgactacggggatttcctcaaacaatgataccacaaagggctttttgcacaactcgatcaaaggcgatgcatccccgaacctctatgctagtgaaaacaagggtgcagatgggagacatgtgcctccacaggaggaacaaagggcgatctttgttgatagaggtgttggctcaccagaatttgcaagacccacaaatgaaacaatttcaatgagcaacatcaagtttgattctgaagcgaaggacatgccagcagctgaaggagctgttgcagcagcagctgtagctgatcaaatgtatggcccaaaggaggatcgcaagttggcaattgtgctggttgggttgccagctcgtggtaagacctttacagcggctaagcttacaaggtaccttcgatggttaggtcatgaaacaaaacacttcaatgttggaaagtaccgccgactcaagcatggcattaatcagacttctctaagtgcatctaattctgttgagcagactgctgatttcttccgtggagacaacaaagaaggtgtggaggcacgcaatgaggtggcggctctagcaatggaggatatgctatcttggatgcaggaaggtggtcaggtaggtatctttgatgccacaaacagcacaagaaaccggagaaatatgctgatgaaaatggcggaaggcaagtgtaagatcatctttttggaaacaatatgtaatgaccaaaatgttctcgagagaaatatgcgcttgaaagttcaacgaagtcctgattatgcggaacagacagattttgaagctggtgttcgagatttcaaagagagattggcctattatgaaaaggtatacgaaccagtggaagaaggctcatatgttaagatgattgatatggtcagtgggactgggggccaattgcagatcaatgatataagtggttacttgcctggccggattgttttcttcttgatatggactagcacactccagaggtcaatattaacagcgcagcctatcattggatttccaaagatacaatggcgtgcacttgatgaaataaacgctggcatctgtgatgggatgacgtatgatgaaataaagaaaattaaacctgaagaatatgaatcacgtagcaaggacaagctgaggtatcgttatcctagaggagaatcctacctcgatgtcattcaaagattagaacctgtaattattgagcttgaacggcagcgtgctccagttgttgtcatatctcaccaggctgtgctaagagcactatatgcatattttgcggataaaccactggaggaacttcctaacattgagataccacttcatacaataattgagatacaaatgggtgttgctggtgttcaagagaaaagatacaaactcatggacgcagtgaactccacagcagggatttag

SEQ ID NO: 168 - protein, 1022 aa, Oryza sativa
MMREGDACVALLRSKLHGLVERNRSLEEENKQLRHQVSRLKGQVSSLEGQDTDRKMLWKKLDNSSTGNSYLKEKQFVPNNDAKEAMDLNSTSCYSRQQFSRAPLVRSRAPRVPNPPPSPTYTQPIVNARKEGGMAPPPPPPPLPSRLLKSTKAVQRVPDVVELYRLLVRREGKNDAKSGSMGIPAATNSREMIGEIENKSAYVLAIKSDVENQSEFINFLAVEVKNAAYKEIADVEEFVKWLDGELSYLVDERAVLKHFPNWPEKKADTMREAAFTYRDLKNLESEASSFHDDRRVATPMALKRMQALQDKIEQGIHNTERARDSASGRYKDLKIPWEWMLDSGIISQLKMASLKLAREFMNRVVNALKSDPFTNDEELLLQGVRFAFRIHQMKLLMEQEEAALWGLSCIVPSHRETLDFKFLLKPKDNSSHCIVEEGPDRSLVCGSNEVEIRNALFKFNDETGVVECKIFVETEILSPFDLAASWKAHQEHLQPRVRGAHDVIMNADSESRAKNGFASGLELDLEKYVVPTPNMGSDVVYAANLTENPRSLLTTGISSNNDTTKGFLHNSIKGDASPNLYASENKGADGRHVPPQEEQRAIFVDRGVGSPEFARPTNETISMSNIKFDSEAKDMPAAEGAVAAAAVADQMYGPKEDRKLAIVLVGLPARGKTFTAAKLTRYLRWLGHETKHFNVGKYRRLKHGINQTSLSASNSVEQTADFFRGDNKEGVEARNEVAALAMEDMLSWMQEGGQVGIFDATNSTRNRRNMLMKMAEGKCKIIFLETICNDQNVLERNMRLKVQRSPDYAEQTDFEAGVRDFKERLAYYEKVYEPVEEGSYVKMIDMVSGTGGQLQINDISGYLPGRIVFFLIWTSTLQRSILTAQPIIGFPKIQWRALDEINAGICDGMTYDEIKKIKPEEYESRSKDKLRYRYPRGESYLDVIQRLEPVIIELERQRAPVVVISHQAVLRALYAYFADKPLEELPNIEIPLHTIIEIQMGVAGVQEKRYKLMDAVNSTAGI

SEQ ID NO: 169 - DNA, 1528 bp, Oryza sativa
  misc_feature (550)..(550): w = adenine or thymine
  misc_feature (883)..(883): w = adenine or thymine
atggcgcacgccgtggagtccatggagaagcttcgagccgccgtgtccaagctcgacgagatgagtgacgaagacaaggactccttcatgcacctcgtctctcgctacctgatcagagggaggagaaagagatgatcgactggaacaaagttgagcgacccacccctgagatggtggtgccgtacgactcactggtgcaggctccccgagagatatccctgagattagaaatctgcttaataaacttgctgtgctcaagcttaatggaggacttgggacgaccatggagtgcgttgctcccaagtgtacgattgaagtccgcagcggccttacctttcttgaccttgctataatgcagactgagagtttctgaacaagaagtatggatgcagcgttcctatccttctaatgaactcattcaacaccagccttgtgaataagaagatcgtggagaagtacacaaacattgaaattcacactttcaatcagcagaataagtaccctcgtatcattactgaaaagttcttgccactttcaagcgaaggaagtwcagggtcccattgctgggtatcccccaggccacggtgatgtgtttttctcattgtgcaaaagtggaatacttgataccatgttgtcacagagtacaacatccttattaatgtctcatggcttgcatcagaaattgaatccttaaccagcacagaaatcctaaaccacttgatccataacaaaaatgagtactgcatggagaggttactccaaaaacatcggctgatgttaaaggtggttctctcatatgttatgaagggttaagaagttgcaatgttaaatttgtagcaaatcatcatgttgcttgtttctactaattgcacattgcgatatwaaacccgtagatgaattccagtcaattgagaacttcaatatgctcaacactaataacctgcgggtgaacttgaaggccatcaagaggctggtaaaagctgaagcactaaagatggaaatcattccaaacctaaaggtgcaccatccggaggaagttgatggtgtgaaagtcttgcaacttgaaaaggaagctggttcagcaatacagagtgctttgaaaaggccattggtgttactgttcctcgctcaaggttccttgcagtaaaaaatacatccgatctgttcctcatcctggtctgatttatatattgtgatggatggcactgtaacccgtaacccagctagagataattcaacaaaccccttgattgatcttggacctgagttcagaaagaggttgacagtttccttgaccgatttaaatcaatccctagtattgttgcgcttgatagcttgaaaatctctggggatgtttggttcggttcaagaattactctcaagagggtgaggtgacgattgctggcccagttagggttaaagctgggatattcttgatggcagtgtttttgataacaaggtaaaagttcatctctggataattatctgttttgtggttattttggaaactgtactattatttcaatga

SEQ ID NO: 170 - protein, 509 aa, Oryza sativa
  misc_feature (184)..(184): Xaa = any naturally occuring amino acid
  misc_feature (295)..(295): Xaa = any naturally occuring amino acid
MAHAVESMEKLRAAVSKLDEMSDEDKDSFMHLVSRYLIRGRRKRXSTGTKLSDPPLRWWCRTTHWCRLPERYPXDXKSAXXTCCAQAXWRTWDDHGVRCSQVYDXSPQRPYLSXPCYNADXEFLNKKYGCSVPILLMNSFNTSLVNKKIVEKYTNIEIHTFNQQNKYPRIITEKFLPLSSEGSXGSHCWVSPRPRXCVFLIVQKWNTXYHVVTEYNILINVSWLASEIESLTSTEILNHLIHNKNEYCMERLLQKHRLMLKVVLSYVMKGXEVAMLNLXQIIMLLVSTNCTLRYXTRRXIPVNXELQYAQHXXPAGELEGHQEAGKSXSTKDGNHSKPKGAPSGGSXWCESLATXKGSWFSNTECFEKAIGVTVPRSRFLAVKNTSDLFLILVXFIYCDGWHCNPXPSXRXFNKPLDXSWTXVQKEVDSFLDRFKSIPSIVALDSLKISGDVWFGSRITLKRVRXRLLAQLGLKLGYSXWQCFXXQGKSSSLDNYLFCGYFGNCTIISM

SEQ ID NO: 171 - DNA, 1889 bp, Oryza sativa; identical to SEQ ID NO: 159
  misc_feature (53)..(53): k = guanine or thymine
  misc_feature (97)..(97): s = guanine or cytosine
  misc_feature (120)..(120): y = cytosine or thymine

SEQ ID NO: 172 - protein, 629 aa, Oryza sativa; identical to SEQ ID NO: 160
  misc_feature (18)..(18): Xaa = any naturally occuring amino acid
  misc_feature (33)..(33): Xaa = any naturally occuring amino acid

SEQ ID NO: 173 - DNA, 1409 bp, Oryza sativa
  misc_feature (39)..(39): r = adenine or guanine
  misc_feature (906)..(906): k = guanine or thymine
  misc_feature (1368)..(1368): m = adenine or cytosine
  misc_feature (1391)..(1391): w = adenine or thymine
  misc_feature (1395)..(1395): k = guanine or thymine
atggcgtcgtcggcgctaatctgcgacaccgagcagtgraagggcctccagggcgagcaggcgcacgtcggggcgattcagaagacgcacctgcgcgatctgatggatgatgccgagcgctgcaaggcaatgacagctgagtatgaaggcatatttctggattactcgaggcagcgtgcaactggcgagaccatggagaagctgtttaaattggcagagaggcggcaaagctcaaggagaagattgagaagatgtttagtggtgacaagcagatccagaagctgcagaatctgccaaagggcgacagttaagattccttgcaaatgttgaccctgttgatgttgcacgaagcatcaaagatttagatcctgaaacaacacttgagttgtggttgtctcaaagaccttcacaacagctgaaacaatgttaaatgctcgaactctcaaggagtggattgtctcttctcttgggacctgatgctgttgcgaaacatatgattgctgtcagtaccaatcttgagttgaagcttgtggagaagtttggaattgaccctaaaaatgcttttgcattttgggactgggttggtggtcgctatagtggtttgcagtgctgttggtgtcctgcccttatctcttcaatatggttttccgattgttcagaaatttttggagggtgcagccagcatcgacaaacacttccgttcatcttcatttgagaaaaacatacctggtactccttggtttgctgagtgtgtggaatgtttcctttcttggatatccagctagagcaatattgccctattcccaggcacttgagaaatttgcaccacatattcagcagagcttagcatggagagtaatggaaagggtgtctctattgatggcgttcaatgtccttgagactggkaaaatgaattgattggtgactggaaccaatgggcaacacagcttctatcaattaatccatcagcagggaagagttattccttgtgattttatcggcgtcgtgaaaagccagcaacccgtttacttgaaagctttcaggggaaattgtgagcaatcatgacgaattgatgtccaatttctttgctcagcctgatgcacttgcttatggaaagcagacccctgaacaactgcacagcgagaaagtacctgaacatcttatctctcataagagacttttcagggcaaccgaccatcacttagtttattgctgccctcattatctgcttatgagattggacagaagtctctggcttctcaagtgagaaaatctctgcatgcatcccgcatggaaggaaagcctgtccaggggttcaacagcagcactgcaagtttgctgacacgatatctcgctgttgagccatcmactccttacaacactacaacaawgcckaaagtttaatatga

SEQ ID NO: 174 - protein, 466 aa, Oryza sativa
  misc_feature (40)..(40): Xaa = any naturally occuring amino acid
  misc_feature (192)..(192): Xaa = any naturally occuring amino acid
  misc_feature (217)..(217): Xaa = any naturally occuring amino acid
  misc_feature (303)..(303): Xaa = any naturally occuring amino acid
  misc_feature (375)..(375): Xaa = any naturally occuring amino acid
  misc_feature (391)..(391): Xaa = any naturally occuring amino acid
  misc_feature (463)..(463): Xaa = any naturally occuring amino acid
QADPEAAESAKGRQLRFLANVDPVDVARSIKDLDPETTLXVVVVSKTFTTAETMLNARTLKEWIVSSLGPDAVAKHMIAVSTNLELKLVEKFGIDPKNAFAFWDWVGGRYSVCSAVGVLPLSLQYGFPIVQKFLEGAASIDKHFRSSSFEKNIPVLLGLLSVWNVSFLGYPARAILPYSQALEKFAPHIQQXLSMESNGKGVSIDGVQVLETGKMNXLVTGTNGQHSFYQLIHQQGRVIPCDFIGVVKSQQPVYLKAFGEIVSNHDELMSNFFAQPDALAYGKQTPEQLHSEKVPEHLISHKXTFQGNRPSLSLLLPSLSAYEIGQKSLASQVRKSLHASRMEGKPVQGFNSSTASLLTRYLAVEPSTPYNTTTXPKVSEKVPEHLISHKXTFQGNRPSLSLLLPSLSAYEIGQKSLASQVRKSLHASRMEGKPVQGFNSSTASLLTRYLAVEPSTPYNTTTXPKV

SEQ ID NO: 175 - DNA, 1050 bp, Oryza sativa
  misc_feature (704)..(704): y = cytosine or thymine
atgcagagcgccgcggcggcgttcggcctcgtccggccgtgccccgcgagggggagggcgcgccacgtggcgtgcggcgcggcggccggggacgccaaggcggaggaggaggaaagcggcctcgccaagacgctgcagctcggcgcgctgttcgggctgtggtacctcttcaacatctacttcaacatctacaacaagcagcaggtcctgaaggttttcccatatccaataaacattacaacagttcaatttgctgttggtactgtcgttgctttgttcatgtggatcactggtatccttaggagaccaaagatttctggtgcacagcagctctttgccatccttcctctagctgtggtccatactatgggcaatcttttcactaacatgagcctggggaaggttgctgtgtcattcacacataccatcaaagctatggaacctttcctttctgttctcctctctgcaattttccttggcgaggtgatactttcacttcttccgattgttggtggtgtagcattggcatctcttactgaggcttcccttcaactgaacagggctgggttttggagtgcaatggcttcaaatgtcaccttccagtcaaggaatgtgctgagcaagaaactcatggttaaaaaggagaagcaggaatctcttgacaacattaatcttttctcaatcataactgtgatgtcattttyccttttggcccctgttgccttcctaacagaaggcatcaaaatcactcctacagttttgcaatctgctggtctgaatgtaaaacaggtgcttacaaggtctttacttgctgcactttgtttccacgcgtaccaacagaggtgtcctacatgatcctcgcgagggtgtctcctgtcactcactccgtgggcaactgtgttaagcgtgtcgtggtcatcgtaacatcggttttgttcttcaggactcctgtttctcctatcaactccctcgggcactgccatcgcacttgccggagttttcctgtactcacaactgaagagactgaagcccaagcccaaggctgcgtaa

SEQ ID NO: 176 - protein, 354 aa, Oryza sativa
  misc_feature (162)..(166): Xaa = any naturally occuring amino acid
  misc_feature (240)..(240): Xaa = any naturally occuring amino acid
  misc_feature (286)..(286): Xaa = any naturally occuring amino acid
MQSAAAAFGLVRPCPARGRARHVACGAAAGDAKAEEEESGLAKTLQLGALFGLWYLFNIYFNIYNKQQVLKVFPYPINITTVQFAVGTVVALFMWITGILRRPKISGAQQLFAILPLAVVHTMGNLFTNMSLGKVAVSFTHTIKAMEPFLSVLLSAIFLGEXXXXXVILSLLPIVGGVALASLTEASLQLNRAGFWSAMASNVTFQSRNVLSKKLMVKKEKQESLDNINLFSIITVMSFXLLAPVAFLTEGIKITPTVLQSAGLNVKQVLTRSLLAALCFHAYQQXVSYMILARVSPVTHSVGNCVKRVVVIVTSVLFFRTPVSPINSSGTAIALAGVFLYSQLKRLKPKPKAA

SEQ ID NO: 177 - DNA, 1650 bp, Oryza sativa
  misc_feature (1200)..(1200): y = cytosine or thymine
atgcaggcgtggttctccggcacggggccctccgcctcgtcggcgtcgtcgtcgtcgtcgccgccgcagccgtcgctgctcgcggaatggaactcctacgccgccgcgcgctccgcggaggaggaggaggacggcggcgggggaggcttcgggatcgacatcgaggccgccgtccgctccgccaacgaccgcgtctccggcaccttcggcgtggtatctaaaggtgttctagggttgccaggcagcttcaagtccacaacaagcagtgttccatcgagcaaatcacttgtgtattttggcctttttcttgctagtggaatattcctagttttcattgcgttcacgatatttctgccagtcatgaggttacctttcaccatgggatttgtgggcagcatggctgctaccatctacgtgtcaatggtgctccatagctacatactttcagttttcttctcttgtcttcagaatttgacaggaattttgggtggcatggcgcggctcccctatccgggaacgggtgatggggttttcgccgcccatggatatctcagattcggcctgggaatttggtatatcctctctctttctctctctgcgtatgagctgatcaagacggccaagtacatcgcgacgccggggaagggcatcctcgccgccgacgagtcgacgggcaccatcggcaagcgcctggccagcatcaacgtggagaacgtggagcccaaccgccaggcgctccgggagctcctcttcacgacgcccggcgcgttccagtacctctccggcgtcatcctcttcgaggagacgctctaccagagcacggccgccggcacgccgttcgtcgacgtgctcaaggccggcggcgtcgtgccggggatcaaggtggacaagggcaccgtggacatcgccggcaccaacggcgagaccaccacccagggcctcgactccctgggcgcgcgctgcgccaagtactacgaggccggcgcccgcttcgccaagtggcgggccgtgctcaagatcggcgccgccggcgagccgtccgagctcgccgtcaagcagaacgccgagggcctcgcccggtacgcgctcatctgccaggagaacggcctcgtccccatcgtcgagcccgagatcctcaccgacggcgcccacgacatcaagacctgcgccgccgtcaccgagcgcgtcctcgccgccgtytacaagtctctcaacgaccacaaggtcctcctcgagggcaccctcctcaagcccaacatggtcacccctggctccgacagcccaaaggttggcgcggaggtgataggggagtacacggtggcggcgctgcggcgcacggtgccaccggcggtgcccgggatagtgttcctctccggcgggcagagcgaggaggaggcgtcgcagaacctgaacgccatgaacaagctggaggtgctcaagccatggacgctcaccttctccttcggccgtgccctgcagcagagcaccatcaagaagtggggcggcaagaaggagaacgtcgccgccgctcaggctgccttcctcgcccggtgcaaggccaactccgaggccacgctcggcaagtacggcggcgccgccggcgacgccgccacgtccgagagcttgtacgtcaagggctacacctactag

SEQ ID NO: 178 - protein, 549 aa, Oryza sativa
MQAWFSGTGPSASSASSSSSPPQPSLLAEWNSYAAARSAEEEEDGGGGGFGIDIEAAVRSANDRVSGTFGVVSKGVLGLPGSFKSTTSSVPSSKSLVYFGLFLASGIFLVFIAFTIFLPVMRLPFTMGFVGSMAATIYVSMVLHSYILSVFFSCLQNLTGILGGMARLPYPGTGDGVFAAHGYLRFGLGIWYILSLSLSAYELIKTAKYIATPGKGILAADESTGTIGKRLASINVENVEPNRQALRELLFTTPGAFQYLSGVILFEETLYQSTAAGTPFVDVLKAGGVVPGIKVDKGTVDIAGTNGETTTQGLDSLGARCAKYYEAGARFAKWRAVLKIGAAGEPSELAVKQNAEGLARYALICQENGLVPIVEPEILTDGAHDIKTCAAVTERVLAAVYKSLNDHKVLLEGTLLKPNMVTPGSDSPKVGAEVIGEYTVAALRRTVPPAVPGIVFLSGGQSEEEASQNLNAMNKLEVLKPWTLTFSFGRALQQSTIKKWGGKKENVAAAQAAFLARCKANSEATLGKYGGAAGDAATSESLYVKGYTY

SEQ ID NO: 179 - DNA, 1698 bp, Oryza sativa
  misc_feature (196)..(196): m = adenine or cytosine
atggcggcggcggcggtggcggcgaacggcggcggcgacggcgcgcaggcgtccaacgcgcccgcccccaccaggctcgcgtcggtctacagcgaggtgcagaccagccgcctcaagcacgcgctccccctcccctccgtcctccgctcccccttcgccctcgccgacggccccgccagcttccgccgccggcaamcccggagatcgcgaagctgttccccaacctgttcggccagccgtccgtgtcgctggtgccgtcgccggagccggcgtccaccaggccgctcaaggtcggcgtcgtgctctccggcggtcaggcgcccggcggccacaatgtcatctgcggcatcttcggattacctgcaggaatatgcaaaaggatccgtcatgtatggattcaagggaggtccagctggagtcatgaagtgcaagtacgttgagctcactgcggattatgtgtacccctacagaaaccagggtggatttgatatgatctgcagtggtagggacaagattgaaacaccagagcaggagcagttcaagcaagctgaagacactgtaaacaaacttgatttggatgggcttgttgtcattggtggtgatgattcaaacacaaacgcatgccttcttgctgagtacttcagagggggaagaacatgaaaactcgtgtcattggttgcccaaagactattgatggagatctgaaatgcaaggaggttccaacaagctttgggtttgacactgcttgcaaggtatcagatatactctgaaatgattggtaatgttatgactgatgcacgctcaaccgggaagtactaccactcatgtagttgtgaggcttatgggacgtgctgcttctcacattacattggagtgtgctctgcaaacacatcctaatgttgcactcattggagaagaggttgctgcaaagaaggaaactcttaaaagtgtcaccgactacattaccgacattgtctgcaagcgtgcagaacttggttacaactatggtgtgatccttatcccagagggtctgattgatttcatcccagagttggcgcatgattgtttgttgatgaggcaggggctttggaaaagcaagcttcaaccagaatccaggcaactgtttgacttcctgcccaaaaccatccaggagcaacttttgcttgaaagagatcctcatggaaatgttcaggttgcaaaaattgaaacagagaaaatgcttattgccatggttgagactgaattggagaagagaaaagctgaggggaagtaccccgcacatttcagaggccaatctcacttctttggtatgaaggaagatgtggccttcctactatttttgattctaactattgctatgcgttaggctacggttctggggcacttctccaatgtgggaagacaggactgattacgtcggttggcaacctcgctgctcctgtggaagaatggaccgttggtggaactgcattgacatcgttgatggatgttgagaggaggcacgggaaagtacaagccagtgatcaagaaggctatggtggaacttgacgggggcaccgtttaagaagtttgcttcattgcgagatgagtggtccctcaagaaccattacatcagccctgggtcccatccagttcagtggccctggaagcaacgatgcgaaccacaccttgatgttggaactcggcgccgaggcatag

SEQ ID NO: 180 - protein, 565 aa, Oryza sativa
  misc_feature (66)..(66): Xaa = any naturally occuring amino acid
MAAAAVAANGGGDGAQASNAPAPTRLASVYSEVQTSRLKHALPLPSVLRSPFALADGPASFRRRQXRRSRSCSPTCSASRPCRWCRRRSRRPPGRSRSASCSPAVRRPAATMSSAASSDYLQEYAKGSVMYGFKGGPAGVMKCKYVELTADYVYPYRNQGGFDMICSGRDKIETPEQEQFKQAEDTVNKLDLDGLVVIGGDDSNTNACLLAEYFRGGRTXKLVSLVAQRLLMEIXNARRFQQALGLTLLARYQIYSEMIGNVMTDARSTGKYYHSCSCEAYGTCCFSHYIGVCSANTSXCCTHWRRGCCKEGNSXKCHRLHYRHCLQACRTWLQLWCDPYPRGSDXFHPRVGAXLFVDEAGALEKQASTRIQATVXLPAQNHPGATFAXKRSSWKCSGCKNXNRENAYCHGXDXIGEEKSXGEVPRTFQRPISLLWYEGRCGLPTIFDSNYCYALGYGSGALLQCGKTGLITSVGNLAAPVEEWTVGGTALTSLMDVERRHGKVQASDQEGYGGTXRGHRLRSLLHCEMSGPSRTITSALGPIQFSGPGSNDANHTLMLELGAEA

SEQ ID NO: 181 - DNA, 1939 bp, Oryza sativa
  misc_feature (30)..(30): r = adenine or guanine
  misc_feature (60)..(60): y = cytosine or thymine
atggactccgactacggcgtgccgcgcgarctgtcggcgctgcagaaggcccgcgcgctytaacggcccggacttcccgccctgcctccagtggcaacggataagcgcaatctgtgagaatcagggcaccacggtgaaggtggagtacggcgacgcggctatcgcggccgacgtggcgggcgctcatgtcatcagccacgccttcccgcacacctacggccagccgctggcgcatttcctcaggaagactgctgctgtgccggatgctaccgtcataacagagcaccctgttgtcagagggttggtgttgtcttcagtgggaggcagtccccaggtgggcacaatgttatatggggactccatgatgctataaaggctcacaacgcaaacagcaagctcattggtttccttgggaggaactgatggattgtttgcacagaaaactttggagatctccgatgaggtcctttcctcttataaaaatcaaggtggttatgatttgcttggacggacaagggatcagatcagaacaactgaacaagtgaatgctgcaatgactgcttgccaagccttgaagttggatgctcttgtaataattggagggtgttacatccaacacggatgctgctcagcttgctgagacttttgctgagtcaaagtgttcaacaaaggtagttggtgttcctgtaactctgaatggggaccttaagaaccagtttgttgagacaactgttggttttgataccatatgtaaggtgaattcgcagctcataagcaatgtctgcactgatgctctttctgctgagaagtattactactttgttcggctgatgggacggaaagcatctcatgtggctttggaatgtgctcttcaatcgcatccaaatatggttatactaggtgaggaggttgctgcatcaaaacttacaatttttgatatcacgaagcagatatgtgacgcagtccaggcaagggctgaaaagggacaaaaatcatggtgttgtacttattcctgagggacttgttgaaagtatccctgaattatatgctttgcttcagttgcaggaaattcatgggctacatgataaaggtgtttctgttgagaacatatcttctcatctttcgccttgggcttcagctctatttgaatttttgcctccatttattaggaaacagcagctacttcttcatcctgaatccgatgactccgctcaactttctcagcagattgagactgagaaacttctagcccaattagttgaagcagaaatgaacaaacgtctgaaggaaggcacttacaaaggaaagaagttcaatgcaatttgtcacttctttggctaccaagccagaggtgccctaccctcaaagttcgactgtgattatgcttatgttcttgggcatgtatgctatcacatcttagctgctggcttaaatggctacatggccactgtgacaaatcttaggagtcctgtgaacaagtggaaatgcggtgctgctcctattactgtgagcatagattacttttttatgctattaaataattttttttaaaactttccatgatgaccgtaaagcgatggtcacgaggaccagctgccagtcaaattgggaagcctgctgttcacatggcgagtatcgacttaaaaggaaaaccatatgattgttgagacaaaactcttccagcttcttgatggaagacatctacagaaaccctggtcctctgcaatttgagggaccaggtggagagacaaagccgatttcattgtgtgtcgaagatcgagactacatggggaggatcaaacaattgcaggagtatttgattgtgaagcctggatgctcccaggatgtcctgaaggcagcgttaagcgccatggcctctgtgacagagatgctaaccatcatgtcttctccctctttcagtggccaagcaaccatctga

SEQ ID NO: 182 - protein, 650 aa, Oryza sativa
  misc_feature (99)..(99): Xaa = any naturally occuring amino acid
  misc_feature (516)..(516): Xaa = any naturally occuring amino acid
  misc_feature (518)..(518): Xaa = any naturally occuring amino acid
  misc_feature (607)..(611): Xaa = any naturally occuring amino acid
MDSDYGVPRELSALQKARALNGPDFPPCLQWQRISAICENQGTTVKVEYGDAAIAADVAGAHVISHAFPHTYGQPLAHFLRKTAAVPDATVITEHPVVXRVGVVFSGRQSPGGHNVIWGLHDAIKAHNANSKLIGFLGGTDGLFAQKTLEISDEVLSSYKNQGGYDLLGRTRDQIRTTEQVNAAMTACQALKLDALVIIGGVTSNTDAAQLAETFAESKCSTKVVGVPVTLNGDLKNQFVETTVGFDTICKVNSQLISNVCTDALSAEKYYYFVRLMGRKASHVALECALQSHPNMVILGEEVAASKLTIFDITKQICDAVQARAERDKNHGVVLIPEGLVESIPELYALLQLQEIHGLHDKGVSVENISSHLSPWASALFEFLPPFIRKQQLLLHPESDDSAQLSQQIETEKLLAQLVEAEMNKRLKEGTYKGKKFNAICHFFGYQARGALPSKFDCDYAYVLGHVCYHILAAGLNGYMATVTNLRSPVNKWKCGAAPITVSIDYFFMLLNNFFXNXSMMTVKRWSRGPAASQIGKPAVHMASIDLKGKPYDLLRQNSSSFLMEDIYRNPGPLQFEGPGGETKPISLCVEDRDYMGRIKQLQEYLXXXXXIVKPGCSQDVLKAALSAMASVTEMLTIMSSPSFSGQATI

SEQ ID NO: 183 - DNA, 1491 bp, Oryza sativa
atggcggccaagtgggcgatgaagaagaagctcgtcggcggcgacgccgggtacgtgctcgaggacgtgccccacctcacggactacctgcccgagcttccgacttacccgaatcctctgcaagacaacccggcttattcagtcgtcaagcaatacttcgtcaacactgacgacaccgtcacgcaaaagatcgttgttcataagaccagtgctaggggcacccatttccggcgagccgggccgcggcagcgggtgtacttccagtccgatgaggtcaacgcggccattgtcacctgcggtggcctctgccctggacttaacactgttatccgcgagcttgtgtgcggcttgtatgatatgtatggcgtcaccagcgtcgttggcatagagggtggatacaagggtttctattctagaaacaccgtcgcactgacaccgaaatcggtgaatgacatccacaagagaggtgggactgttcttggaacctccagaggaggccatgacaccggcaaaatagttgacagtattaaggatcgcggtattaaccaggtgtatattattggaggtgatggtacccagaaaggtgcttccgtaatttatgaggaagttcggaggcgaggcctcaaatgttctgtggttggtgtcccaaagaccatagataacgacattgcggtgatcgacaagtcctttggttttgacactgcggtggaggaggctcagagggccatcaatgctgctcatgttgaggctgagagtgcagagaatggcattggtgttgtgaaactaatggggcgcaacagtgggttcatcgcaatgtatgctactctggctagtcgcgatgtggattgttgcttaatcccagagtctccattctatctagaaggaaaaggtggactccttgaattcatcgagaaacggctcaaggacaatggccatatggtcattgtagtggctgagggtgctgggcaagatctcattgcgaaaagcatgaattttgtggatactcaagatgcttctggaaataagctacttctggatgttggcctttggctctcccagaagatcaaggatcatttcaagaagaagcgcaacttccccatcactctcaagtacatcgacccgacatacatgatccgtgccgtcaggtcaaacgcatccgacaacgtctactgcaccctgctagctcacagcgccctccacggcgccatggcggggtacaccggcttcaccgtcgcgccggtcaacggcaggcacgcgtatatcccgttctacagaatcacggagaagcagaacaaggtggtgatcacggacaggatgtgggcgagggtgctgtgctcgacgaaccagccatgcttcctgagccacgaggacgtcgagcacctcaagcacgacgacgacgagcaccacctgcacaacacgcagctcctcgaaggcgagagctcgccggtgaaggactcctccaagtgcaacgggacagcagcgccagtgtga

SEQ ID NO: 184 - protein, 496 aa, Oryza sativa
MAAKWAMKKKLVGGDAGYVLEDVPHLTDYLPELPTYPNPLQDNPAYSVVKQYFVNTDDTVTQKIVVHKTSARGTHFRRAGPRQRVYFQSDEVNAAIVTCGGLCPGLNTVIRELVCGLYDMYGVTSVVGIEGGYKGFYSRNTVALTPKSVNDIHKRGGTVLGTSRGGHDTGKIVDSIKDRGINQVYIIGGDGTQKGASVIYEEVRRRGLKCSVVGVPKTIDNDIAVIDKSFGFDTAVEEAQRAINAAHVEAESAENGIGVVKLMGRNSGFIAMYATLASRDVDCCLIPESPFYLEGKGGLLEFIEKRLKDNGHMVIVVAEGAGQDLIAKSMNFVDTQDASGNKLLLDVGLWLSQKIKDHFKKKRNFPITLKYIDPTYMIRAVRSNASDNVYCTLLAHSALHGAMAGYTGFTVAPVNGRHAYIPFYRITEKQNKVVITDRMWARVLCSTNQPCFLSHEDVEHLKHDDDEHHLHNTQLLEGESSPVKDSSKCNGTAAPV

SEQ ID NO: 185 - DNA, 1449 bp, Oryza sativa
atgtccccgatgctactgtcatatcagagcatccctgttgtcagggttggtgttgttttctgcggaaggcagtccccgggaggccataatgtcatctggggactccatgaggcaattaaggctcacaacccaaacagcaaacttattggttttcttggtggaagtgatggtcttctcgcacagaaaactttggagatcaccgacgaagttctttcttcatataaaaaccaaggtggttatgatatgcttggccggacaaaggatcaaattagaacaacagagcaggtcaatggtgccatggctagttgtcaggctttgaagttggatgctttagtaatcattggaggtgttacatccaatacggatgctgctcaacttgctgagacttttgctgaggctaagtgtgcaacgaaggttgtaggtgttcctgtaactttgaatggggaccttaagaatcagtttgttgagacaaccgttggttttgataccatatgcaaggtgaactcacaacttataagcaatgtatgcaccgatgctctttcggctgagaaggttatcctaggtgaggaggttgctgcatcaaaacttaccatctttgatatcacgaagcagatatgtgatgcagttcaggcaagggctgagaaggataagtatcacggagttgtacttattccggagggactcgtggagagtattcctgaattatatgctttgcttcaggaaattcatgggcttcacggcaaaggtgtttccatggagaatatctcctcacagctttcaccttgggcatctgcactatttgagtttttgcccccatttattaggaagcagctgcttctccatcctgaatctgatgactcagctcaactttctcagattgaaaccgaaaaacttttggcccaattagttgaggatgaaatgaacaggcgtatggttcttgggcacgtgtgctaccacatcttagctgctggtttgaatggttacatggctactgtgacaaatcttaagagtcctgcgaacaaatggcgatgtggtgcggctccgatttcgtctatgatgaccgtgaagagatggtcacgtggtcctgcggctactcaaatagggaaacctgctgtccatatggctactgtcgacttgaaaggcaaagcattcgagctattgaggaacaattctaccagcttcttaatcgacgacatctacagaaacccaggaccactccaattcgaaggagcaggtgctgattcaaagcctatttcactgtgcgtggaagatcaagactatatgggcaggatcaagaaactccaggaatacttggagaaggtgaaaagcatcgtgaagcctgggtgctcgcaggatgttctcaaggcagcgctgagcgctatgtcatctgtgaccgagacattggcgatcatgacatcgtcttccactggccagggaaccccactctga

SEQ ID NO: 186 - protein, 482 aa, Oryza sativa
MSPMLLSYQSIPVVRVGVVFCGRQSPGGHNVIWGLHEAIKAHNPNSKLIGFLGGSDGLLAQKTLEITDEVLSSYKNQGGYDMLGRTKDQIRTTEQVNGAMASCQALKLDALVIIGGVTSNTDAAQLAETFAEAKCATKVVGVPVTLNGDLKNQFVETTVGFDTICKVNSQLISNVCTDALSAEKVILGEEVAASKLTIFDITKQICDAVQARAEKDKYHGVVLIPEGLVESIPELYALLQEIHGLHGKGVSMENISSQLSPWASALFEFLPPFIRKQLLLHPESDDSAQLSQIETEKLLAQLVEDEMNRRMVLGHVCYHILAAGLNGYMATVTNLKSPANKWRCGAAPISSMMTVKRWSRGPAATQIGKPAVHMATVDLKGKAFELLRNNSTSFLIDDIYRNPGPLQFEGAGADSKPISLCVEDQDYMGRIKKLQEYLEKVKSIVKPGCSQDVLKAALSAMSSVTETLAIMTSSSTGQGTPL

SEQ ID NO: 187 - DNA, 1221 bp, Oryza sativa
atggccgccgcagccacgacatcctcccacctgctcctgctctcccgccagcaggcggcggcctcgctccaatgcggcctctccttccggaggcagcccggcaggctcgccggtgggtcgtcggccccgagcgtgcggtgcatggcggccgtcgacacggcctcggcgcccgccgcgacggaggctagcaagaagagcagctacgagatcaccacgctgacgacgtggctgctgaagcaggagcaggccgggaccatcgacggcgagatgaccatcgtgctggccagcatctccacggcgtgcaagcagatcgcctcgctggtgcagcgcgcgcccatctccaacctcaccggcgtccagggcgccgtcaacgtgcagggcgaggaccagaaaaaactcgacgtcgtctccaacgaggtgttctccaactgcctcaaatcgagcgggcgcaccggcgtgatcgcgtcggaggaggaggacgtgccggtggccgtggaggagagctactcgggcaactacatcgtggtgttcgacccgctcgacggctcctccaacatcgacgccgccgtctccaccggctccatcttcggcatctacagccccaacgacgagtgcctagccgacatcgccgacgaccaaaatcttgaccaggtggagcagaggtgcatcgtgagcgtgtgccagccggggagcaacctgctcgccgccggctactgcatgtactcgagctcggtcatcttcgtgctcaccatcgggacaggggtgtacgtgttcacgctggacccgatgtacggcgagttcgtgctgacgcaggagaaggtgcagatccccaaggcaggcaagatctatgccttcaacgagggcaactacgcgctctgggacgacaagctcaagagctacatggacagcctcaaggagcccgggccgtccgggaagccatactccgcgcgctacatcggcagcctcgtcggcgacttccaccgcacgctgctctacggcggcatctacggctaccccagggaccagaagagcaagaacggcaagctgcggctgctgtacgagtgcgcgccgatgagcttcatcgtcgagcaggccggcggcaagggctccgatggccaccagaggatacttgacatcatgcctacggagatccatcagagagtgccgctgtacatcgggagcgtggaggaagtggagaaggtcgagaagttcttggcttga

SEQ ID NO: 188 - protein, 406 aa, Oryza sativa
MAAAATTSSHLLLLSRQQAAASLQCGLSFRRQPGRLAGGSSAPSVRCMAAVDTASAPAATEASKKSSYEITTLTTWLLKQEQAGTIDGEMTIVLASISTACKQIASLVQRAPISNLTGVQGAVNVQGEDQKKLDVVSNEVFSNCLKSSGRTGVIASEEEDVPVAVEESYSGNYIVVFDPLDGSSNIDAAVSTGSIFGIYSPNDECLADIADDQNLDQVEQRCIVSVCQPGSNLLAAGYCMYSSSVIFVLTIGTGVYVFTLDPMYGEFVLTQEKVQIPKAGKIYAFNEGNYALWDDKLKSYMDSLKEPGPSGKPYSARYIGSLVGDFHRTLLYGGIYGYPRDQKSKNGKLRLLYECAPMSFIVEQAGGKGSDGHQRILDIMPTEIHQRVPLYIGSVEEVEKVEKFLA

SEQ ID NO: 189 - DNA, 822 bp, Oryza sativa; identical to SEQ ID NO: 143

SEQ ID NO: 190 - protein, 272 aa, Oryza sativa; identical to SEQ ID NO: 144
  misc_feature (42)..(42): Xaa = any naturally occuring amino acid
  misc_feature (84)..(84): Xaa = any naturally occuring amino acid
  misc_feature (113)..(113): Xaa = any naturally occuring amino acid
  misc_feature (165)..(165): Xaa = any naturally occuring amino acid
  misc_feature (224)..(224): Xaa = any naturally occuring amino acid

SEQ ID NO: 191 - DNA, 713 bp, Oryza sativa
atggcgagcccgcagtgctgcgcgaacccaccgacgctgaacccggccggcggggaggggaaggtggtggagagcttcggcgggatcaaggcgtacgtcgccggcgccgcggagtccaaggccgccgtcgtcctcatctccgatgtcttcgaggaagatagccgacaaagttgcctcgtctggatactttgttgtggtgccagatttcttacatggggatcctttagtacctgaaagtactgagaaaccgtttcaaatgtggataaaagaacatggcccgaaagcatttgaagaggcgaaaccaattattgccgctctgaaggagaaaggagtgtctagtattggggctgtaggttattgctggggtggcaaaggtggtggtagagttagtgaaagctcatgagatccaggctgctgtgatgtgtcacccctcttttgtgactgttgatgatatgaaaggtctagatttcagaggtcaaatgcccaattgctatacttggagctgaaattgatcgtatgtccccaccagaagtggtgaagcagttcgagcaggttctttcttcaaagtcagggttggccactttgtcaagatcttccctggggttgaacatggatggactgtgagatacaagaatgatgatgcagctgctgtcaagagcgccgaggaagccctggcggacatgattgactggtttaataagaacctgaagtga

SEQ ID NO: 192 - protein, 236 aa, Oryza sativa
  misc_feature (224)..(224): Xaa = any naturally occuring amino acid
TRPAGRGRWWRASAGSRRTSPAPRSPRPPSSSSPMSSRKIADKVASSGYFVVVPDFLHGDPLVPESTEKPFQMWIKEHGPKAFEEAKPIIAALKEKGVSSIGAVGYCWGGKVVVELVKAHEIQAAVMCHPSFVTVDDMKGLDFREVKCPIAILGAEIDRMSPPEVVKQFEQVLSSKSGLHFVKIFPGVEHGWTVRYKNDDAAAVKSAEEALADMIDWFNKNLKXADMIDWFNKNLK

SEQ ID NO: 193 - DNA, 2145 bp, Oryza sativa
atgccgcgtcgccgcccacgcgtcgttatcgtcgttgcccactcgttgtcgtcaccgcccactcgtcgttgccgtcgggggtcggtgatgagaacatcaacaccaacgatatatccacgcctccacaagtacaacttcaacgtcctattactcgcgctcgtgcacgtcaactcaactatcaggaacaatggagagaatcaaatgggtgaggattcgcgcggggtggattcggactgcagcacagtcccaacttttgacggtcgccatgacttcatgcgaactctgatttgggcgtgcaagtactatcaagtctaccttcaaatggatctagcctcttgtccatatcagttctggagcagccgcaatcttcatttttctaccgagttcttttctgtccacgttgcttgttcatcttgttcttgctggttctcgattgcttacaccgcctctggagttggtgtaacgattgctaaggcgcaacatccctggatagttgtagtcggatcgccaacgtcactccatccaatctacttatccctctcatcgaaatatcgggacaccctcaagcacatcagtcggcgccgccgcgaagggggcagcccgagcgacggggacgacgcggcagccgctagccaccagcacgcgcacgccgcccactcgtgctcggtaccgagagaggaagagaaagagagggagaggagagaaagactttcgcgagccgtatcgtatccattggatggagccctagagcaacaagaagaagccaagaatatttgcgccatggagggtggtaattccagcaagggcgccatggagggtggtcaccgctgccgccgcccaaacgtcgacgacgatgaccagatcgaggagggagagatctgctacgactgccacgtctcgggctccgagaccgacgacgacgagcaccacagacgcgccgtgctccctccccgcgacaatggcgatggctgcgcggagcacaaacggtgccgcctcgacaatgctgctacggcgcccgcaccctctgccgggccggtgctgaccaccagcaacggaagcgccatcgtcgccatcgcctccgctgccgccgccgcagcagctgcggcgtcgacaatggcgcgggaggtgttcgcgtgccgcatctgccggaaggagttcgacacccggaaggccgtggacgggcacatgagagttcaccgtcagcaatccattgccacccccaagtataatgccgcagacaactctcgtgtcactgtggtcgctgagcccagaaccgatcttgatctttccggtccacacgggagcagcagcgcgccgccgtcgccaccagcgccggccaatcctcccaatcataatcaggccgtcggtcaccaaccagcggctgccgcgccgaacgccggcgtcgtcgtcgtcgtcgaaggggcgccgcaaaaaagtctaccatacatgtgcaagatgcagggctgcggcagggcgttccccacgcaccaggggctaggtggccacgctgccggccaccagaacaggagcaaggcagcggcggcggcggcctccgagcagggcagcagcggagcgggggccgacgggtgccacggcggcgccgacagcagcaagcatcggtgcagagaatgcggcatggagtggaagacaggtttcgcgctcggcggccacatgaggaagcaccaaactaaggagacggtgaccgtgaacgagaaggagccgaatgtcgctggcaagcacatctctcttggaccaccacctttgccggaccttactccggccgccgctgaggtaacttcgtcggaaccacttgatcagccaccactactgtcaatggtggtgggtgcagaagttgcagcaccggcgctgcttgcgctggccaacgaggcagcggcattgccgccacaggatgatcaggcagaggaagaggcggctgcagaagccgctgcaccggccgaggcagcggcattgcgaccggttgaggcagggcagaggcggccgatgttggagcagcaccagaggagccgctgctggcgcctattgccggcatgggaaccgtgcgtattttcggttttttggttgagaagccggcacctggagacggcagtggaggagagggttcagcgcctgcatagatcgtcctag

SEQ ID NO: 194 - protein, 714 aa, Oryza sativa
MPRRRPRVVIVVAHSLSSPPTRRCRRGSVMRTSTPTIYPRLHKYNFNVLLLALVHVNSTIRNNGENQMGEDSRGVDSDCSTVPTFDGRHDFMRTLIWACKYYQVYLQMDLASCPYQFWSSRNLHFSTEFFSVHVACSSCSCWFSIAYTASGVGVTIAKAQHPWIVVVGSPTSLHPIYLSLSSKYRDTLKHISRRRREGGSPSDGDDAAAASHQHAHAAHSCSVPREEEKERERRERLSRAVSYPLDGALEQQEEAKNICAMEGGNSSKGAMEGGHRCRRPNVDDDDQIEEGEICYDCHVSGSETDDDEHHRRAVLPPRDNGDGCAEHKRCRLDNAATAPAPSAGPVLTTSNGSAIVAIASAAAAAAAAASTMAREVFACRICRKEFDTRKAVDGHMRVHRQQSIATPKYNAADNSRVTVVAEPRTDLDLSGPHGSSSAPPSPPAPANPPNHNQAVGHQPAAAAPNAGVVVVVEGAPQKSLPYMCKMQGCGRAFPTHQGLGGHAAGHQNRSKAAAAAASEQGSSGAGADGCHGGADSSKHRCRECGMEWKTGFALGGHMRKHQTKETVTVNEKEPNVAGKHISLGPPPLPDLTPAAAEVTSSEPLDQPPLLSMVVGAEVAAPALLALANEAAALPPQDDQAEEEAAAEAAAPAEAAALRPVEAGQRRPMLEQHQRSRCWRLLPAWEPCVFSVFWLRSRHLETAVEERVQRLHRSS

SEQ ID NO: 195 - DNA, 3526 bp, Oryza sativa
  misc_feature (2244)..(2244): s = guanine or cytosine
atggcttccagcggcggcggcggcctgcgtcacagcaacagcagccgcctctcgcgcatgtcctactccggcgaggacggccgcgctcaggcccccggcggcggcggcgaccggccgatggtgacgttcgcccgccgcacccactcggggcgctacgtgagctactcccgcgacgacctcgacagcgagctcggcaacagcggcgacatgtcgccggagtctgggcaggagttcctcaactaccacgtgacgatcccggcgacgccggacaaccagccgatggacccggccatctcggcgcgcgtggaggagcagtacgtctccaactcgctcttcaccggcggcttcaacagcgtcacgcgggcgcacctcatggacaaggtgatcgagtcggaggccagccacccgcagatggccggcgccaagggctcctcctgcgccatcaacggctgcgacgccaaggtcatgagcgacgagcgcggcgacgacatcctcccctgcgagtgcgacttcaagatctgcgccgactgcttcgccgacgccgtcaagaacggcggcgcctgccccggctgcaaggacccctacaaggccaccgagctcgacgacgtggtcggtgcgaggccgacgctgtcgctgcctccgccgcccggtggcttgccggcgtcgaggatggagaggcggctgtcgataatgcggtcgcagaaggccatgaccaggagccagaccggcgattgggatcacaatcggtggctgttcgagaccaaggggacatacgggtatggcaatgccatttggcccaaggagaacgaggtcgacaatggcggtggcggtggcggaggcggcgggctgggtggaggcgacggccagccggcagagttcacgagcaagccatggaggccgctcactcgcaagctcaagattcctgcgggtgtccttagcccatacagccatgcaggcttcttattcttattcgtatggctgttcttggtctattccttgcatggagaattaagcacaagaatgaggatgcaatgtggctatggggcatgtctgttgtttgcgaactctggtttggcctctcttggctcttggatcagctgccaaagttgtgccctgttaaccgagcaactgaccttgctgtcctgaaagataagtttgagaccccgacgccatcaaatcctaacggaagatctgacctgccggggctcgatatatttgtgtctactgctgatccagaaaaagaacccccattggtcacagcaaatactattctgtccatccttgctgctgattatcctgttgagaagctttcttgctatgtttctgatgatggaggcgctctcctgacatttgaagcaatggctgaagccgctagctttgcaaacatgtgggttcctttctgtcgcaaacatgacattgagcctcgcaacccagagagctactttaatctgaagagggacccatacaagaacaaggtccgttctgattttgtcaaggacagaagaagggtgaagagggagtacgacgagttcaaggtcaggatcaatagcttgcctgattcaatccgtcgccgctccgatgcatatcatgccagggaggaaatcaaggccatgaagcggcaacgagaggctgctctcgatgacgtggtggaggctgttaaaatccctaaagctacctggatggctgatggcacgcattggcctggtacctggattcagccctctgctgagcatgctcggggtgaccatgctggaataattcagttcaggtaatgctgaaacctcctagtgatgatcccttgtatggaaccagcggtgaagaaggcagacctcttgatttcactgaggttgacatccgtttgccaatgttggtctatgtgtcccgagagaagcgtcctggttatgatcacaacaagaaggctggtgcgatgaatgcgttggtccgctcatctgctgtcatgtcaaatggacctttcatcctcaaccttgattgtgatcactatgtttacaactcacaagctttccgtgaaggcatgtgcttcatgatggatcgtggtggtgaccgtattggctatgtccagttccctcaacggtttgagggcattgatccatcagatcgatatgctaaccacaacactgtcttcttcgatgtcaacatgcgtgcacttgatggtatcatgggaccagtctacgtcggcactggatgtcttttccgtcgcatcgctttgtatggatttgacccacsgcgctccaaggaacatagtggttgctgcagctgttgcttcccccagaggcgcaaggttaaaacttccacagttgcatctgaagagaggcaggctttgagaatggcagattttgatgatgaggaaatgaacatgtcacaatttcccaagaagttcggtaattcaaacttcctcatcaactctatcccaattgctgaattccaagggcgacctcttgctgaccatcctggagtcaaaaatggacgtcctcctggtgctctcaccgtccctcgcgaccttctcgatgcttccacagttgctgaggctatcagtgtcatctcatgctggtatgaagataagactgagtggggtcagcgtgttggatggatctatggttcagtcacagaggatgtggtcactggttacaggatgcacaaccgtggatggaaatcagtttactgtgtcaccaaacgtgatgctttccgtggcactgcaccaatcaaccttactgaccgtcttcatcaggtgctccggtgggctactggttcagtggaaatcttcttctcccgcaacaatgcactacttgcaagccgaaagatgaagtttcttcagaggattgcatacctgaacgttggcatttaccccttcacatcaatcttcctcattgtctactgcttcctgccagccctgtccctcttctcgggacagttcattgtgcggacgctaaatgtgaccttcctgacctatctgctcgttatcactctgacaatgtgcatgcttgcggtgctcgagatcaagtggtcaggcatcagcttggaggaatggtggaggaatgagcagttctggctaatcggaggaactagcgcccaccttgctgctgttcttcagggtcttctcaaggtgattgctggtatcgagatctccttcacgctgacatccaaatctggaggagatgaagcagacgacgagtttgctgatctctacatcgtcaagtggacatcactcatgatcccaccgatcgtcatcatgatggttaacctgatcgccatcgctgtcgggttcagcaggacaatatacagtgaaatccctcagtggagcaagctcctcggcggcgtgttcttcagcttctgggtgctggctcacctttaccccttcgccaaggggctaatgggaaggagaggacgaacaccgaccatcgtcttcgtctggtctggcctccttgccatcaccatctcattgctgtgggttgccatcaatccgccgtcacagaactcgcagataggcggctccttcacattcccctga

SEQ ID NO: 196 - protein, 229 aa, Oryza sativa
  misc_feature (41)..(41): Xaa = any naturally occuring amino acid
  misc_feature (53)..(53): Xaa = any naturally occuring amino acid
  misc_feature (83)..(83): Xaa = any naturally occuring amino acid
  misc_feature (128)..(128): Xaa = any naturally occuring amino acid
  misc_feature (156)..(156): Xaa = any naturally occuring amino acid
WLPAAAAACVTATAAASRACPTPARTAALRPPAAAATGRWXRSPAAPTRGATXATPATTSTASSATAATCRRSLGRSSSTTTXRSRRRRTTSRWTRPSRRAWRSSTSPTRSSPAASTASRGRTSWTRXSSRRPATRRWPAPRAPPAPSTAATPRSXATSAATTSSPASATSRSAPTASPTPSRTAAPAPAARTPTRPPSSTTWSVRGRRCRCLRRPVACRRRGWRGGCR

SEQ ID NO: 197 - DNA, 384 bp, Oryza sativa
atggctttagcagcacattttgacaagtactcattcggcaaccaagcaaatcaggcgataggattgagaggcaccaggactatagcttcatccagacaaaatccgcagcacggtccgccatggatggtctcgaggttgcactctcctgggttgatgagcatggcggcgagccccctctgcatctcccttgggcagccagggaagtcctctaggaggcgtcccttgaatgcgccgctcaactctacagcgcgaaccaacgcctgctacagtgcatgcattggaggcagtcagcccccgagcgtacatccccgcgctggctgctgcggggagaatggacagaagaatggagaccgagaggaggaggttcctggatactattgttga

SEQ ID NO: 198 - protein, 127 aa, Oryza sativa
MALAAHFDKYSFGNQANQAIGLRGTRTIASSRQNPQHGPPWMVSRLHSPGLMSMAASPLCISLGQPGKSSRRRPLNAPLNSTARTNACYSACIGGSQPPSVHPRAGCCGENGQKNGDREEEVPGYYC

SEQ ID NO: 199 - DNA, 969 bp, Oryza sativa
atgagcagcgaggataagggccactcatggcttaaggagtgccacctccctagcgacctccatcggccaggctcccacacctgcatccaccacccctgtgtctccccgcaccctttgtccccgccgctcaagcatgtctcccaccctaaagagggatggggaagaaaaagattgggtatttcctttccccacgatcccctcaacgacgccgccgccgccgccactccaccaccactccctcgccgtcgccgtggttgctcccgcccctactccggtgatcaaacaatggcgatggagctggagcgcgccaccaagaagaggcgcggcggcatcgacgacctccccgacgacctcatcgtggatatcctctcgcgtctcccggccaaatccgtctgccgcttcaagtgcgtctcctggcgctggcgccgcctcatctcccaccgcgaccaccgcaagaagctcccccacacgctctccggcttcatctcccgctactacgggcccctcaacgacgacgagctcgtctcgatcccccatttcgacagcatcgatggaggagaagaagatgaagaggagcaccgccttgttcctgacccttccttgtccttcttgcttggatacatgtccatctctcccaaggattgctgcaatggccttctcctctgtttgtgttgcaagaattccccgagagatgaatccgattacgtggtctgcaaccctgccactcagagatggatcatcttgcccgagatcgacgattacgaccagctcgcctccatccgtctgtgtttcgatccggcattgtcaccctacttccatgtctttgcaatcctggaggatgcggatggatgcataaccggcgtggagattttctcgtcggagacgggcggtggagccacagggagaatggttgggttgaccaagatgatcacatggtcctttcgccattacgtcctcttgctccgttga

SEQ ID NO: 200 - protein, 322 aa, Oryza sativa
MSSEDKGHSWLKECHLPSDLHRPGSHTCIHHPCVSPHPLSPPLKHVSHPKEGWGRKRLGISFPHDPLNDAAAAATPPPLPRRRRGCSRPYSGDQTMAMELERATKKRRGGIDDLPDDLIVDILSRLPAKSVCRFKCVSWRWRRLISHRDHRKKLPHTLSGFISRYYGPLNDDELVSIPHFDSIDGGEEDEEEHRLVPDPSLSFLLGYMSISPKDCCNGLLLCLCCKNSPRDESDYVVCNPATQRWIILPEIDDYDQLASIRLCFDPALSPYFHVFAILEDADGCITGVEIFSSETGGGATGRMVGLTKMITWSFRHYVLLLR

SEQ ID NO: 201 - DNA, 2886 bp, Oryza sativa
atgcgccttgcactgatttctttgttgcccctgttgctggtggcctccaaaatcacagcagcagcagcatgcattggaaaggaaagagatgcactattcgacttgaaggccaccctgagagaccctggaggcatgctgtcctcttgggtaggtctaaattgttgcaactggtatggcgtgacttgcaacaacaggactggacatattatcaagctcaacctcgcaaactataatatcagcaaggaggatgctctaacaggtgacatcagtccatcattggttcatttaactcatttgatgtacctcaatcttcgttcgaatgattttggaggtgcaagaatccctgcgttcataggatctctgaagaacctgaggcatcttgacttgtcctttgctaatttcggtgggaaaattccccctcagcttggaaacttatctaagctgaattacctggatattagctttccttataacaactttagcagctttacttccagtagctctgttgacaatcttctttgggtctctcagctttcttcactggtttaccttgacatgtcattgtggaacctttctgtggcttcagattggctgcagtctttgaacatgcttgcttccctcaaagtgcttcgtttgtctggtaccaatcttccacccactaatcaaaattctctatcccagtctaacttcacagttctcaatgaaattgatctatcaggcaacaacttcagctctagattcccgaattggttggcaagcatatacactctgtcattaattaatttggactattgtgagctgcatggctcaattcctgaatctgtgggaaatttaactgcccttaataccctttacttggctgacaacagtttgattggagcaattccaatatctaagttgtgtaacttgcagatccttgatttgtcgaacaacaaccttataggtgatattgctgatttggggaaggcaatgacccgctgcatgaagggactatctatgatcaaattggggaataataatctatctggaagtctatccgggtggattggatccttcccaaacctcttctcagtcgatctcagcaaaaactcactatcaggtcatgtacataccaatatcagtcagctcacagagttaattgaactggacctttctcacaattcactcgaagatgtcttgtctgaacaacacctaacaaatctaactaagctaaaaaagctagatttatcttacaattccttgagaatttctgtgggagcaaattggttaccaccctttcaactttatgaactccttttaggttcttccccactacaatcacaagtcccgcagtggcttcaaacacaagttggaatgcagacattagatttgcacagaacggggactctaggtcaattgcctgattggctttggacgtcattgacctctctcattaacttggatctctctgacaatctgcttactggcatgctaccagcatccctggttcatatgaagtcactgcagttcttggggctcagctcgaaccaattggaaggtcagattcctgatatgccagaaagtctagacctgctagatctctccaacaactctttatctggatcattgcccaatagtgtgggagggaacaagacacgttacattttattgtcaagcaatcgtctaaatagaagcatacctgcgtacttttgcaacatgccatggttgtcagcaatagacctatcaaacaacagcttatcaggcgagctacctaattgttggaagaacagcacagaactatttttggtggatttctcgtacaacaacctggaaggacacataccttcaagtcttggctctcttacttttcttggttccctgcatttgaacaacaataggctatctgggttgttgccttcctctctaagttcatgcgggcttctggttttccttgatattggagataataatttggagggttccatacctgaatggataggagataacatgcaatacctcatgattcttcgtttgcgatcaaatcgtttcactggaagcatcccgtctgaattgtcacagcttcaaggtcttcaagtgttggatcttgccaataacaagctgtcagggcccctgccacaaggtattggaaattttagtgaaatggcttcacagaggtcaagacatattataccgatgcagatttctggtgatagttttggtggatctctctatcacaatgagagtctatacattaccatcaaaggagaagaaagattgtattctaagatcctttatctgatgaagagcattgacctttctaacaattatctaacaggtggaattcctgctgaagttggagatcttgtagggctcaaaaacctgaatctctcgaaaaatctcctgagtggtcatattccagagacaattggtaatatgagttcattggagtcgcttgatctctcatggaaccgactgtcaggcataattcctgaaagcatgacatcactgcacttgttgagccacctgaacatgtcctacaacaatctgtccgggatggtaccccagggctctcagcttcaaacccttggtgatgaagatccatacatctatgctggcaacaagtatctctgcatccatcttgcttctggcagctgttttgaacagaaagataaccatgttgatcaagcagagcataatgatgtccatgatatctggctgtatatattttcaggattgggcttcggagtaggattttcttctgtgtggtggcttcttgtgtgcagcaaggcagtgggcaagaggtatttccagttcgtcgactccacatgtgagaaagttattcactggatgatcctactggagaagaaggtgaataagaaaacagtgggaaaaagttcggtattgtga

SEQ ID NO: 202 - protein, 961 aa, Oryza sativa
MRLALISLLPLLLVASKITAAAACIGKERDALFDLKATLRDPGGMLSSWVGLNCCNWYGVTCNNRTGHIIKLNLANYNISKEDALTGDISPSLVHLTHLMYLNLRSNDFGGARIPAFIGSLKNLRHLDLSFANFGGKIPPQLGNLSKLNYLDISFPYNNFSSFTSSSSVDNLLWVSQLSSLVYLDMSLWNLSVASDWLQSLNMLASLKVLRLSGTNLPPTNQNSLSQSNFTVLNEIDLSGNNFSSRFPNWLASIYTLSLINLDYCELHGSIPESVGNLTALNTLYLADNSLIGAIPISKLCNLQILDLSNNNLIGDIADLGKAMTRCMKGLSMIKLGNNNLSGSLSGWIGSFPNLFSVDLSKNSLSGHVHTNISQLTELIELDLSHNSLEDVLSEQHLTNLTKLKKLDLSYNSLRISVGANWLPPFQLYELLLGSSPLQSQVPQWLQTQVGMQTLDLHRTGTLGQLPDWLWTSLTSLINLDLSDNLLTGMLPASLVHMKSLQFLGLSSNQLEGQIPDMPESLDLLDLSNNSLSGSLPNSVGGNKTRYILLSSNRLNRSIPAYFCNMPWLSAIDLSNNSLSGELPNCWKNSTELFLVDFSYNNLEGHIPSSLGSLTFLGSLHLNNNRLSGLLPSSLSSCGLLVFLDIGDNNLEGSIPEWIGDNMQYLMILRLRSNRFTGSIPSELSQLQGLQVLDLANNKLSGPLPQGIGNFSEMASQRSRHIIPMQISGDSFGGSLYHNESLYITIKGEERLYSKILYLMKSIDLSNNYLTGGIPAEVGDLVGLKNLNLSKNLLSGHIPETIGNMSSLESLDLSWNRLSGIIPESMTSLHLLSHLNMSYNNLSGMVPQGSQLQTLGDEDPYIYAGNKYLCIHLASGSCFEQKDNHVDQAEHNDVHDIWLYIFSGLGFGVGFSSVWWLLVCSKAVGKRYFQFVDSTCEKVIHWMILLEKKVNKKTVGKSSVL

SEQ ID NO: 203 - DNA, 2190 bp, Oryza sativa
atggcgtccctcccacgcgccgctccacgccgctcggctcctggcccccgcggccgcggcggcggaagagttgtaagcgcggccccgttcgcgcgggtctcgcctgcgccgcgcggtcgtgctaccgcttccggaccgacgacgacggcgtggtggacgtggccgtctccggggaggatggggacggcggcggcggggggtacgcggtgtccgtcgaggtccctggcaatcgcgggcggaaggcgggctagtgctccgcgcctcggggtccggcgagggcgtcccgctggcgccggccgccggcggcgcctccctcgcggccgagctctccttcgacccgacccgcgcgccgttctacctctcgttcctgctcacggacgcgtcgggggcggagatacggacgcaccgcaagacgagcttccgcgtgcccccgccgccgtcggcggcggcggcggcgacgagcccgcgctggagatcgacctcgatccgtacatccaccggactggcaacgtctggcatgtctctctggcgagcgtagatgggtacgtcagctatgccttctgctgcggtggcatccgccgcccactgttggacccgtacgccaaggtgatcggagacttcgtctccagcaactcggtttacgacgagggtgtcactgcgccgtcaatgaggtgctttgcatcgttggcgattgcgccgagctacaactggggaagggacaggcacccccgtctgccattggagaagctggtggtgtaccgggcaaatgtggctttgttcacaaaggacaggtcgagcgggctcccggatgacgctgccggcactttcaccgggctttctgctaaggtagagcacttcaggagccttggtgtcaatgcaattttgctggaaccagtgttcccatttcatcaggtgaaaggaccttatttcccgtaccatttcttttcaccgatgaacttgtatagcagcaaaggtttgagtgtttcagccatcaagtccatgaaggatatggtcagggtaatgcatagaaatggaatagaggtcctcttggaggtggtttttacacatactgctgagggagaatcagagtgtcagacgatatcaatgcgtggcattgataattcctcgtattacattgccaatgggatcgcaggatgcaaagcgagcatactgaattgcaaccatccggtgactcagaagctgattttggacagcctccgccattgggtgcttgacttccatgttgatgggttttgcttcatcaatgcccctttccttgtgagaggtcctggtggtgaatatttatctcgacctccccttcttgaggcgataacttttgacccggttctttccatgacaaagatcattgcagatccttggtctccacttgacatatctaacgtgcaattcccattccctcattggaaaagatgggctgaggtgaacacaagattctctattgatgtgcgcaaatttttgaagagagaagcacttattagtgatcttgctacacgcctcaatgatgatcttctttctgagtcgagctggaattgtggtgaagaaggtccatcagagaacagtgctgtccttcagacaaggctaaggcagatacgcaacttcttatttattctatttgtatcacttggtgttcctgttctgaacatgggagatgaatgtgggcactctgctgctggttcagtatcatacaaggatagagggcctctgaactggagaggcatgaagacaacatttgttaaggaagtgaccggattcatttcatttctaactgcactcaggagtcggcgaggcgatatctttcagagaagggaattcctaaaacttgagaatatacattggtatgggagcgatctatgtgagccaggttgggatgatcctaccagcaactttctttgcatgcacataaatgcagaggtagatgaaatggcggcagattcggtcagaggcgacctgtacatctgtttcaatgcaaacgaggaatcagtgagtgctgccttgcctgctcttgcagaaggatccgtgtggttgcgcttggttgacacatcacttgcatttccaggtttctttgcaaccgaatctaatcccaaggtgcaacaagtgccaggattatcctcttatcatgtggaagcgcatacttgtgttctatttgaatcaaagagcgctcttgcctag

SEQ ID NO: 204 - protein, 729 aa, Oryza sativa
MASLPRAAPRRSAPGPRGRGGGRVVSAAPFARVSPAPRGRATASGPTTTAWWTWPSPGRMGTAAAGGTRCPSRSLAIAGGRRASAPRLGVRRGRPAGAGRRRRLPRGRALLRPDPRAVLPLVPAHGRVGGGDTDAPQDELPRAPAAVGGGGGDEPALEIDLDPYIHRTGNVWHVSLASVDGYVSYAFCCGGIRRPLLDPYAKVIGDFVSSNSVYDEGVTAPSMRCFASLAIAPSYNWGRDRHPRLPLEKLVVYRANVALFTKDRSSGLPDDAAGTFTGLSAKVEHFRSLGVNAILLEPVFPFHQVKGPYFPYHFFSPMNLYSSKGLSVSAIKSMKDMVRVMHRNGIEVLLEVVFTHTAEGESECQTISMRGIDNSSYYIANGIAGCKASILNCNHPVTQKLILDSLRHWVLDFHVDGFCFINAPFLVRGPGGEYLSRPPLLEAITFDPVLSMTKIIADPWSPLDISNVQFPFPHWKRWAEVNTRFSIDVRKFLKREALISDLATRLNDDLLSESSWNCGEEGPSENSAVLQTRLRQIRNFLFILFVSLGVPVLNMGDECGHSAAGSVSYKDRGPLNWRGMKTTFVKEVTGFISFLTALRSRRGDIFQRREFLKLENIHWYGSDLCEPGWDDPTSNFLCMHINAEVDEMAADSVRGDLYICFNANEESVSAALPALAEGSVWLRLVDTSLAFPGFFATESNPKVQQVPGLSSYHVEAHTCVLFESKSALA

SEQ ID NO: 205 - DNA, 1041 bp, Oryza sativa
atgacatggccatctgacaagctggtgattcaggtgctggatgactctacagatccagccataagggagatggtggagggagagtgcgggcgatgggcggggaagggcgtgagcataaggtacgagaacaggcggaacaggagcgggtacaaggcgggggcgatgcgggaggggctgcggaaggcgtacgcgagggagtgtgagttggttgccatcttcgacgcagacttccagccggacgccgacttcctcctgcgcacagtgccggtgctggtggcggacccgggggtggcgctggtgcaggcgaggtggcggttcgtgaacgcggacgagtgccttctgacccgcatccaggagatgtcgctggactaccacttccgcgtggagcaggaggtggggtcggcgtgccacggcttcttcgggttcaacggcacggcgggcctttggccggttcgagccctggaggaggccggcgggttgaaggagcggacgacggtggaggacatggacctggcgctcgtcgcccacctcctcaccttctccttctactgcgtcgtcatccccgcctgcgtcctcgccggctccgaccacgtccgcctccccaagtacgtcgccctctacgtccccgccgccatcaccctcctcaacgccgcctgcaccccgcgctcctgccatctcctcatcttctggatcctcttcgagaacgtcatgtccatgcaccggaccaaggccacgctcatcggcctgctcgaggccacccgcgccaacgagtgggtcgtcaccgacaagcgaggcaacgccaaccccaagcaccagcagccagctaataccaccaccaggcctgggaggaagaccaccaccagctccagccgcacaagcttcttcaataatgacgtccatgtcgccgagatcctcctgggggcctgcctgctctactgcgccctctacgacatcgcctacggccgcgacagcttctacatctacctgctcctccagtcggccgccgccttcatcgtcggcttcggctacgtcgggacctag

SEQ ID NO: 206 - protein, 346 aa, Oryza sativa
MTWPSDKLVIQVLDDSTDPAIREMVEGECGRWAGKGVSIRYENRRNRSGYKAGAMREGLRKAYARECELVAIFDADFQPDADFLLRTVPVLVADPGVALVQARWRFVNADECLLTRIQEMSLDYHFRVEQEVGSACHGFFGFNGTAGLWPVRALEEAGGLKERTTVEDMDLALVAHLLTFSFYCVVIPACVLAGSDHVRLPKYVALYVPAAITLLNAACTPRSCHLLIFWILFENVMSMHRTKATLIGLLEATRANEWVVTDKRGNANPKHQQPANTTTRPGRKTTTSSSRTSFFNNDVHVAEILLGACLLYCALYDIAYGRDSFYIYLLLQSAAAFIVGFGYVGT

SEQ ID NO: 207 - DNA, 2379 bp, Oryza sativa
  misc_feature (128)..(128): s = guanine or cytosine
atggacgccgccgccgccgccgccggccggggcgggcccggcccttccccgctgcgcccgcgccgagacggattcggaggatgcggtcgcgacgacaagctcgccgcactccgccgaggccgcgggcscggcggaccaggggaacggggccccggccccgttggcggatgccgccgacttcgagggatgaaggagagaaggccactgtacatgctgaaggggccgctggagaatgctcctccggtgagggatttcgttggggtgttgaaggcgtcttttgatcggactggtctgcctgctctgattgcagaggtcaagaaggcttcaccgagccgcggtgtcctgagggaggacttcgagccggttcagatcgcccaaacatatgagaaaaatggagcagcatgcttaagtgttctcacagatgcaaaatactttcagggaagttttgactatttggatgctatacgcaatgctggagtacagtgtcctctgctgtgcaaagagttcattgttgatgcctggcaactttactatgcgcgtttgaagggagcagatgctgttcttctgattgctgctgtcttacctgatcttgatatcaagtatatgttgaaaatatgcaaaatacttggcatggctgctttagttgaggtgcatgatgaaagggaaatggaccgtgtgttagggatagatggtgtccagctcatcggcatcaataaccgtaacctcgagacttttcaagttgatatttcaaacactaaaaatcttcttgagggtgaaagaggacaaactatagctcagaaaggcataattgttgtaggggaatcagggctgttcacaccagaccatatttcattcgttcagaatgctggggttaaagctgttctcgttggggagtctctcatcaagcaggaggatcctggcaaagcaatcgctgggcttttcggcaaagacatctcacctaccacatcgattgacttccttgcaaagtaccagtttgatttcaacacatgcttccgtgaaggaatatattatttatccagaacacaagaagaagaggcacttcagaaattatatacattgcataataatgaaacatctgcatatccaaacacttccgaggaggaagaagatgcgccattaaagagtgctgcggatgttcttttcacagaaagaatgaagatcaaattcaatgagtggcgcaattcaatagtcagcaatcaaagagtcgatgaccataggtcagaaaacttcaaattcgcagaccagttccagactgttttcttcaaaatgcgtcctgctatcatgcttaatggattcacgtcacatcagttaaagttaatccgacagattttaagaacacattttagggaccttgtgtatgtgtgtacatttttggaggatggcgtatcagagaagagagtagtttatacagacaccaatgaagacaagatatccttgatgaaaaatgttcgggaagatctactaaaaagcagggaagcaaaagtcaaatcagcagtagggatccgtcatgtcattgatcttcttgcctcagaaaggaaattgattgttggtcatagttgtttcctaggttatcttgcttcacttcaggtgctaagcatgaagcagctctgtgcttatcatggcattaaatttgagcaactctctcccctggaggacctagcaacaaacattaatctgaagaaacacatcaatctgctgcccccatgctggaacagtggaacagtgcttgatttgagtactggcacggagagaccagatgcaggttataagcgtagatatcctgctgccgtgtatgacaacgtcattcttatctggggattccagtctaaggtgagaccaaaggatataaaggactgcatctgcaaagtgtttggtcgagcttctgttacatcagtcttcccgattgattccactgcggttcttgttcaattcagcaaacaagagtctgtaaacgatttcttggatctgaaggctaccttagagagtgcagatagtgctatttcagtcttgcaccctttgtcaactatactggaaggaggcaaaacacgagcggcaaaatatgatacctacagagatatttgccgctcctctgtatcaaagttctccttcgcggatcaagctgaagcggtttgttcaacttcaaacagcgagtccaagttcaaggagtgcaatgctgctgatggatccggagcatacgggagtgctcttgatggaactgtgcctgcctcggtgcagcagtcaggaggagcgaagtctggctccaagaataaaggcgacgatgatttttcataccaggatatcttagatgcgctacaggatggcaaaacatcagttggcaaacgaatgagtaacgcatga

SEQ ID NO: 208 - protein, 792 aa, Oryza sativa
MDAAAAAAGRGGPGPSPLRPRRDGFGGCGRDDKLAALRRGRGRGGPGERGPGPVGGCRRLRGMKERRPLYMLKGPLENAPPVRDFVGVLKASFDRTGLPALIAEVKKASPSRGVLREDFEPVQIAQTYEKNGAACLSVLTDAKYFQGSFDYLDAIRNAGVQCPLLCKEFIVDAWQLYYARLKGADAVLLIAAVLPDLDIKYMLKICKILGMAALVEVHDEREMDRVLGIDGVQLIGINNRNLETFQVDISNTKNLLEGERGQTIAQKGIIVVGESGLFTPDHISFVQNAGVKAVLVGESLIKQEDPGKAIAGLFGKDISPTTSIDFLAKYQFDFNTCFREGIYYLSRTQEEEALQKLYTLHNNETSAYPNTSEEEEDAPLKSAADVLFTERMKIKFNEWRNSIVSNQRVDDHRSENFKFADQFQTVFFKMRPAIMLNGFTSHQLKLIRQILRTHFRDLVYVCTFLEDGVSEKRVVYTDTNEDKISLMKNVREDLLKSREAKVKSAVGIRHVIDLLASERKLIVGHSCFLGYLASLQVLSMKQLCAYHGIKFEQLSPLEDLATNINLKKHINLLPPCWNSGTVLDLSTGTERPDAGYKRRYPAAVYDNVILIWGFQSKVRPKDIKDCICKVFGRASVTSVFPIDSTAVLVQFSKQESVNDFLDLKATLESADSAISVLHPLSTILEGGKTRAAKYDTYRDICRSSVSKFSFADQAEAVCSTSNSESKFKECNAADGSGAYGSALDGTVPASVQQSGGAKSGSKNKGDDDFSYQDILDALQDGKTSVGKRMSNA

SEQ ID NO: 209 - DNA, 1410 bp, Oryza sativa
atggtgctgcatgctgatctacctacttcacagagtgcatctattaagacaatcgtctgcgtgccatttatcatgcatggtgtccttgagctcgggaccactgatccgatttcggaggacccggctctcgtcgaccgtatcgcggcgtcgttctgggatacgccgccccgcgcggcgttctcgtcggaggcgggagacgccgacatcgtcgtcttcgaagacctcgaccatggcaacgccgccgtcgaagcgacgacgacgacggtcccgggggagccacacgcggtagccggcggcgaggtcgccgagtgcgagcccaactccgacaacgacctcgagcagatcaccatggacgacatcggcgagctctacagcctctgcgaggagctggacgtcgtgcgccctctcgacgacgacagtagcagctgggcggtcgcggatccctggtcgtcctttcagctagttccgacgtcttctccggcgccggatcaggcgccggcggcggaagctactgacgtcgacgacgtcgtcgtcgccgctttagacagtagctccattgatggatcttgcaggccgtcgccgtcgagttttgtggcgtggaagaggacggcggactcggacgaggtgcaggccgtgccgctcatcagcggagagccgccacagaagttgctgaagaaagctgtcgccggagccggtgcctggatgaacaatggtgacagcagcgcggcggcgatgacgactcaaggaagcagcatcaagaaccatgtcatgtcagagagaaggcgccgggagaagctcaacgagatgttcctgattctcaaatcagttgtcccgtccattcacaggggtaatactaattactacttcatccgtttcacaatattcattaccatcaatatgaatatgggaaatgctagaatgacttacattatgaaacggagggagtgtaatttttttagaaccaaatttgtcaaggtggacaaagcatccattctcgcagaaacgatagcctacctcaaagagctggagaaaagagtggaagagctggaatccagcagccaaccatcgccatgtccattggaaacaagaagcaggcgaaagtgccgtgagatcactgggaagaaggtttctgcaggagcgaagagaaaggcgccggcgccggaggtggccagcgacgacgacaccgacggggagcggcgccattgtgtgagcaacgtgaacgtcaccatcatggacaacaaggaggttctcctcgagctgcaatgccagtggaaggaattgctgatgacgagagtgttcgacgcgatcaagggagtctccctggatgtcctctcggtgcaggcatcaacatcggatggtctccttggactgaagatacaagccaaggtcgtcatctcagcggctaagtag

SEQ ID NO: 210 - protein, 469 aa, Oryza sativa
MVLHADLPTSQSASIKTIVCVPFIMHGVLELGTTDPISEDPALVDRIAASFWDTPPRAAFSSEAGDADIVVFEDLDHGNAAVEATTTTVPGEPHAVAGGEVAECEPNSDNDLEQITMDDIGELYSLCEELDVVRPLDDDSSSWAVADPWSSFQLVPTSSPAPDQAPAAEATDVDDVVVAALDSSSIDGSCRPSPSSFVAWKRTADSDEVQAVPLISGEPPQKLLKKAVAGAGAWMNNGDSSAAAMTTQGSSIKNHVMSERRRREKLNEMFLILKSVVPSIHRGNTNYYFIRFTIFITINMNMGNARMTYIMKRRECNFFRTKFVKVDKASILAETIAYLKELEKRVEELESSSQPSPCPLETRSRRKCREITGKKVSAGAKRKAPAPEVASDDDTDGERRHCVSNVNVTIMDNKEVLLELQCQWKELLMTRVFDAIKGVSLDVLSVQASTSDGLLGLKIQAKVVISAAK

SEQ ID NO: 211 - DNA, 1092 bp, Oryza sativa
atggagggtacaccaaacaaatcagttcaaagcttcgctggctcgagaactgagaaatctaccgggtctagtcatcatagagaagcagagcaaaatgacagttttacaagaagggaatatacttgtgctgattttattgaagcacttcgcttgattgatcaggaggcattcaagtgtagcattgttctgaatgacttctccatgcgagcaaacatcactgaaccatcttaccgcacagtgaaattagatggtatctgctcaacctttgtttcatcagttttagctggtggatatacctacacaggtgaggttgctaccactgatggagatgcaaaggaaaatgcagcccgtgtggcgatcaagtcaatccttgtagatattattgcagttactagaagcaaccacatgttggagagcatcaggtcaaacaaaccaacaggaacaacaatacaaggagagcagtcaagccagcagacaagtgcccatcctgcagtaattttcaccccacctgctagtaataacatcccttgtgctccccaccatcactatatgctgcatgcgccatttgctcctcttgaacagatgcagtggcgccatcctggtactccacagatggtgccggtttttcctcatgaacagatacagtggcgccatcctaccccagtacatatgccatttcatccccatgaacagatgcaatgccgccaatcccctgcaccaatgccgtttcttccccgtgaacagatgcaatggcgccatcccgctgcaccaatgccaacatttcctccccatgaacagatgcaatggcataatcctgttgcacagatggcatatcttccacctgaacagatgcaacggaatgttccaattgtacacacaccatctgaaatgatgcaaatgtggcagcttcctcaatcaatatccagctctaatcctgtgctgcaaaatgggctttactcgaatacaggtggcgatgatgacatggtagtagaggttggttccgctgaggagactatgactttgagtggtactaagcgcaaaatggaccaaactgaagaggcagagggcaagcaggcaaagatctccaagtag

SEQ ID NO: 212 - protein, 363 aa, Oryza sativa
MEGTPNKSVQSFAGSRTEKSTGSSHHREAEQNDSFTRREYTCADFIEALRLIDQEAFKCSIVLNDFSMRANITEPSYRTVKLDGICSTFVSSVLAGGYTYTGEVATTDGDAKENAARVAIKSILVDIIAVTRSNHMLESIRSNKPTGTTIQGEQSSQQTSAHPAVIFTPPASNNIPCAPHHHYMLHAPFAPLEQMQWRHPGTPQMVPVFPHEQIQWRHPTPVHMPFHPHEQMQCRQSPAPMPFLPREQMQWRHPAAPMPTFPPHEQMQWHNPVAQMAYLPPEQMQRNVPIVHTPSEMMQMWQLPQSISSSNPVLQNGLYSNTGGDDDMVVEVGSAEETMTLSGTKRKMDQTEEAEGKQAKISK

SEQ ID NO: 213 - DNA, 561 bp, Oryza sativa
atggctagcaaggtcgtcttcttcgcggcggcgctcatggcggccatggtggccatctccggcgcgcagctgagcgagtcggagatgaggttcagggacaggcagtgccagcgggaggtgcaggacagcccgctggacgcgtgccggcaggtgctcgaccggcagctcaccggccgggagaggttccagccgatgttccgccgcccgggcgcgctcggcctgcggatgcagtgctgccagcagctgcaggacgtgagccgcgagtgccgctgcgccgccatccgccggatggtgaggagctacgaggagagcatgccgatgcccctggagcaaggctggtcgtcgtcgtcgtcggagtactacggcggcgaggggtcgtcgtcggagcaggggtactacggcgaggggtcgtcggaggagggctactacggcgagcagcagcagcagccggggatgacccgcgtgaggctgaccagggcgaggcagtacgcggcgcagctgccgtcgatgtgccgggttgagccccagcagtgcagcatcttcgccgccggccagtactag

SEQ ID NO: 214 - protein, 186 aa, Oryza sativa
MASKVVFFAAALMAAMVAISGAQLSESEMRFRDRQCQREVQDSPLDACRQVLDRQLTGRERFQPMFRRPGALGLRMQCCQQLQDVSRECRCAAIRRMVRSYEESMPMPLEQGWSSSSSEYYGGEGSSSEQGYYGEGSSEEGYYGEQQQQPGMTRVRLTRARQYAAQLPSMCRVEPQQCSIFAAGQY

SEQ ID NO: 215 - DNA, 1609 bp, Oryza sativa
  misc_feature (295)..(295): s = guanine or cytosine
atgaagacggcatcaatggcggcgtcgctgctcatcccgctctgcctctgcatcctcctcctgcgcggcgcctccgccgtgagcgaccagcaagaagccggccgtcgcgatagctgcgaccgcatcgaccgccgcatccgcgcgctggagccgacgcgccgcgtcgactccgaggccggccacaccgagctctacgacgaccgcgacggccagctcccctgcgccggcgtcgccgccgcgcgcatcaccatccagcgcaacggcctcctcctcccttcctattccaactcccccsgcctcgcctacatcgtccacggccgtggcatcgtcggcgtcgtcatccccggctgccccgagacgtaccaggagacctcgtcgtcgtcgtcgcaggagcaggaggacgacgagcgccgccgccgtggccgccgtggtgatgaggagagacggcgatcgagcgagggagaggaggaggaggaagaggagaccagccgccgcagcttcgagcagtccatccgcgacgagcaccagaggatcaccaccgtccgccagggcgacgtcgtggccatccccgccggcgcgccgttctgggtccacaacgacggcgactccccgctcgtcgccatctccgttcacgacgtcagcaacaacgccaaccagctcgaccaaacctccagggtacttccggctagccggcgggcaggcgaggagcgaggggaggcagaggtacggtgagggcgagtcgtcggagtcggagacggaacgcggcggcgaggagtcgtacaacatcctgagcggcttcgacaccgagctgctcgccgagtcgatgcgcgtcagcccggacatcgcgcgcaagctgcagggccgcagcgacaagcgcggcaacatcgtgcgcgtccgccgcggcggcctccgcatgctccgcccggcgacggagcgggtgaccgacgaggagatgatgaggggcgccaacgccgccgccgccgccgggaacgggatcgacgaggccgtctgcttgatgaagctccgcgagaacgtcgccgacccgatgaaggccgacctctacacccccaatggcggccgcatcaccgtcctcaacagccagaagctccccgtcctcaagctcatcaagatgagcgtcaaccgcggcgtcatgcgccgggaacgcgatcctggcgccgcactggaacatcaacgcgcacgcggcggtgtacgcgacgagcgggagcgcgaggctgcaggtggtgagcagcgaggggcggcgggtgttcgacggcgagctccggcgcgggcagatggtggtggtgccgcagagcttcgcggtggcggggcgcgccggcgacgaggggttcgcgtgggtgtcgttccagacgagcgacggcgccatgaacgcgccggtggttggcaagtcgtcggcgctgcgcgggatgccggcggacgtgctggacaacgcgttcggcgtgtcgagggaggaggcgcgcatggtcaagttcgggagggggcaggagctcgccatcttctcccccaagtccggcgccgccgcccgccgccgccgctttcccggccacagggacgacggcgtgctcgccgccccggcctgaggcgtacgtag

SEQ ID NO: 216 - protein, 531 aa, Oryza sativa
  misc_feature (99)..(99): Xaa = any naturally occuring amino acid
MKTASMAASLLIPLCLCILLLRGASAVSDQQEAGRRDSCDRIDRRIRALEPTRRVDSEAGHTELYDDRDGQLPCAGVAAARITIQRNGLLLPSYSNSPXLAYIVHGRGIVGVVIPGCPETYQETSSSSSQEQEDDERRRRGRRGDEERRRSSEGEEEEEEETSRRSFEQSIRDEHQRITTVRQGDVVAIPAGAPFWVHNDGDSPLVAISVHDVSNNANQLDQTSRYFRLAGGQARSEGRQRYGEGESSESETERGGEESYNILSGFDTELLAESMRVSPDIARKLQGRSDKRGNIVRVRRGGLRMLRPATERVTDEEMMRGANAAAAAGNGIDEAVCLMKLRENVADPMKADLYTPNGGRITVLNSQKLPVLKLIKMSSTAASCAGNAILAPHWNINAHAAVYATSGSARLQVVSSEGRRVFDGELRRGQMVVVPQSFAVAGRAGDEGFAWVSFQTSDGAMNAPVVGKSSALRGMPADVLDNAFGVSREEARMVKFGRGQELAIFSPKSGAAARRRRFPGHRDDGVLAAPA

SEQ ID NO: 217 - DNA, 654 bp, Oryza sativa
atgaaaatcctcatcatccttcaccacaattcaaatattatagttgaagcatagtagtagaatccaacaacaatgaagatcattttcgtatttgctctccttgctattgttgcatgcaatgcctctgcgcggtttgatcctcttagtcaaagttataggcaatatcaactacagtcgcatctcctactacagcaacaagtgctcagcccatgcagtgagttcgtaaggcaacagtatagcatagtggcaacccccttctggcaaccagctacgtttcaattgataaacaaccaagtcatgcagcagcagtgttgccaacagctcaggctggtagcacaacaatctcactaccaggccattagtattgttcaagcgattgtgcaacagctacaactgcagcaatttagtggtgtctactttgatcagactcaagctcaagcccaaactctgttgaccttcaacttgccatccatatgtggtatctaccctaactactatagtgctcccaggagcattgccactgttggtggtgtctggtactgaattgtaacaatataatagttcgtatgttaaaaataaagtcatacatcatcatgtgtgactgttgaaacttagggtcatataaatctaaataaaatcatcttacctatttaa

SEQ ID NO: 218 - protein, 217 aa, Oryza sativa
  misc_feature (1)..(217): Xaa = any naturally occuring amino acid
MKILIILHHNSNIIVEAXXXNPTTMKIIFVFALLAIVACNASARFDPLSQSYRQYQLQSHLLLQQQVLSPCSEFVRQQYSIVATPFWQPATFQLINNQVMQQQCCQQLRLVAQQSHYQAISIVQAIVQQLQLQQFSGVYFDQTQAQAQTLLTFNLPSICGIYPNYYSAPRSIATVGGVWYXIVTIXXFVCXKXSHTSSCVTVETXGHINLNKIILPI

SEQ ID NO: 219 - DNA, 1042 bp, Oryza sativa
atgaagatcattttcttctttgctctccttgctattgctgcatgcagcgcctctacgcagtttgatgctgttactcatgtttacaggcaatatcagctgcagccgcatctcatgctgcagcaacagatgcttagcccatgcggtgagttcgtaaggcagcagtgcagcacagtggaaatccccttcttccaatcacccgtgtttcagctgagaaactgccaagtcatgcagcagcagtgctgccaacagctcaggatgatcgcgcaacagtctcactgccaggccgttagcagtgttcaggtgattgtgcagcagctacagctacaacagtttactggcatcaacttcgatcagactcaagctctagcccaagctatgttggccctaaacttgccgttaatatgcagtatctacccaagctacaacactgctccctgtagcattcgcacggtcggtgaatgaagatcattttcttctttgctctccttgctattgctgcatgcagtgcctctgcgcagtttgatgctgttactcaagtttacaggcaatatcagctgcagccgcatctcatgctgcagcaacagatgcttagcccatgcggtgagttcgtaaggcagcagtgcagcacagtggcaacccccttcttccaatcacccgtgtttcaactgagaaactgccaagtcatgcagcagcagtgctgccaacagctcaggatgatcgcacaacagtctcactgccaggccattagcagtgttcaggctattgtgcagcagctacggctacaacagtttgctagcgtctacttcgatcagagtcaagctcaagcccaagctatgttggccctaaacatgccgtcaatatgcggtatctacccaagctacaacactgctccctgtagcattcccaccgtcggtggtatctggtattgaattgtagcagtatagtagtacaggagagaaaaataaagtcatgcatcatcgtgtgtgacaagttgaaacatcggggtgatacaaatctgaataaaaatgtcatgcaagtttaa

SEQ ID NO: 220 - protein, 347 aa, Oryza sativa
  misc_feature (1)..(347): Xaa = any naturally occuring amino acid
MKIIFFFALLAIAACSASTQFDAVTHVYRQYQLQPHLMLQQQMLSPCGEFVRQQCSTVEIPFFQSPVFQLRNCQVMQQQCCQQLRMIAQQSHCQAVSSVQVIVQQLQLQQFTGINFDQTQALAQAMLALNLPLICSIYPSYNTAPCSIRTVGEXRSFSSLLSLLLLHAVPLRSLMLLLKFTGNISCSRISCCSNRCLAHAVSSXGSSAAQWQPPSSNHPCFNXETAKSCSSSAANSSGXSHNSLTARPLAVFRLLCSSYGYNSLLASTSIRVKLKPKLCWPXTCRQYAVSTQATTLLPVAFPPSVVSGIELXQYSSTGEKNKVMHHRVXQVETSGXYKSEXKCHASL

SEQ ID NO: 221 - DNA, 1422 bp, Oryza sativa
  misc_feature (284)..(284): r = adenine or guanine
  misc_feature (835)..(835): m = adenine or cytosine
  misc_feature (883)..(883): y = cytosine or thymine
  misc_feature (901)..(901): y = cytosine or thymine
  misc_feature (913)..(913): r = adenine or guanine
  misc_feature (929)..(929): m = adenine or cytosine
  misc_feature (934)..(934): m = adenine or cytosine
  misc_feature (1011)..(1011): w = adenine or thymine
atggcgaagtcatcgtctctcgtgacgaaggttttggtgcagcggcggcggcgcgttcaccgttctcgccgttctcccaccaagccggagcgcgctgccgccgccgacacgttcggttccctcgcgggttgtccctcgtcgccggagtatccggtggtgccggacttggacgactgcgtcgtcgacaccgccgtggatgacgctcccgtggtggcggcggaggcggcaggccgacgcgcgtcggacgagacgctggcggtgcacgccggggagaagctcgggarcggcgccgctgagacggactcgatcgcgacgccgatcgtgagcggcacgacgcactggttcagggactcggcggacctcatcgcgttccgggaaggccggcggcggagcttcgagtacgggcggtacggcaacccgacggtgaaggtgctggaggagaagatcagcgcgctggagagggcggaggcgacgctggtgacctcctccggtatgaacgccatcgtcgccacgctgctcgccctcgtccctcccggcggccacgtcgtcgccaccgccgactgctacagcgaggcccgcgcattcatccgcgacaagctctccaacatgggcatcacggtcgacgttcgtcgatcttgacgacgacatggaggcgctggaatgtgttcttgatgagagcgaggtgacgatgttctacgccgactcgatgacgaaccctcacctgaaggtcgtcgacgtgacacgcgtggcggagctgtgccaccggagaggcgcgctggtgtgcatcgacagcacgctggcatcgcccatcaaccagaagccgctcgccctcggmgccgacgtggtcctccactccgccaccaagtacatcgccggccaccaygacgtcatcgccggctgygtcagcggctcrgaggccctcatctcgmggatmcgcgcgtggcaccacgacctcggcggcgccatcagtccggaacgcggcgtacatgatcattcggggattgaagacgwttgcgctgcgggtggaggcgcagaacaggacggcgctgcggatggcgcggctgctggagaagcaccccaagatcgagcgcgtctactaccctgggctggagagcagcctgtggcacggcgtcgcgacgaggcagatggccggcgccggcggcgtggtcagcttcgatgtggcgtcggacttgcgcggcgtgatgaggttcgtggatgcgctggagttgcctctcatcgcaacgtcgctcggtggatgtgaaagccttgtgcagcaaccggccgtcatgtcctactgggggtaagagtgaggaggagaaggcgaagaatgggatcaaggataattttgtgaggttcagttttgggattgagaagtttgaggatctcagggacgacatactccaggccctagagaagatttag

SEQ ID NO: 222 - protein, 472 aa, Oryza sativa
  misc_feature (95)..(95): Xaa = any naturally occuring amino acid
  misc_feature (337)..(337): Xaa = any naturally occuring amino acid
MAKSSSLVTKVLVQRRRRVHRSRRSPTKPERAAAADTFGSLAGCPSSPEYPVVPDLDDCVVDTAVDDAPVVAAEAAGRRASDETLAVHAGEKLGXGAAETDSIATPIVSGTTHWFRDSADLIAFREGRRRSFEYGRYGNPTVKVLEEKISALERAEATLVTSSGMNAIVATLLALVPPGGHVVATADCYSEARAFIRDKLSNMGITVDFVDLDDDMEALECVLDESEVTMFYADSMTNPHLKVVDVTRVAELCHRRGALVCIDSTLASPINQKPLALGADVVLHSATKYIAGHHDVIAGCVSGSEALISRIRAWHHDLGGAISPNAAYMIIRGLKTXALRVEAQNRTALRMARLLEKHPKIERVYYPGLESSLWHGVATRQMAGAGGVVSFDVASDLRGVMRFVDALELPLIATSLGGCESLVQQPAVMSYWGKSEEEKAKNGIKDNFVRFSFGIEKFEDLRDDILQALEKI

SEQ ID NO: 223 - DNA, 1512 bp, Oryza sativa
atggcatccataaatcgccccatagttttcttcacagtttgcttgttcctcttgtgcaatggctctctagcccagcagctattaggccagagcactagtcaatggcagagttctcgtcgtggaagtccaagagaatgcaggttcgataggttgcaagcatttgagccaattcggagtgtgaggtctcaagctggcacaactgagttcttcgatgtctctaatgagcaatttcaatgtaccggagtatctgttgtccgtcgagttattgaacctagaggccttctactaccccattacactaatggtgcatctctagtatatatcatccaagagggagaggtataacagggccaactttcccaggctgtcctgagtcctaccaacaacagttccaacaatcaggccaagcccaattgaccgaaagtcaaagccaaagtcaaaagttcaaggatgaacatcaaaagatccaccgtttcagacaaggagatgtaattgcattgcctgctggtgtagctcattggtgctacaatgatggtgaagtgccagttgttgccatatatgtcactgatctcaacaacggtgctaatcaacttgaccctaggcaaaggggatttcttgttagctggaaataagagaaaccctcaagcatacaggcgtgaggttgaggagcggtcacagaacatatttagtggctttagcactgaactacttagcgaggctcttggcgtaagcagccaagtggcaaggcagctccaatgtcaaaatgaccaaagaggagaaattgtccgtgtcgaacacgggctcagtttgctgcagccatatgcatcattgcaggagcaggaacaaggacaagtgcaatcaagagagcgttatcaagaaggacaatatcagcaaagtcaatatggaagtggctgctctaacggtttggatgagaccttttgcaccctgagggtaaggcaaaacatcgataatcctaaccgtgctgatacatacaatccaagagctggaagggttacaaatctcaacacccagaatttccccattcttagtcttgtacagatgagtgcagtcaaagtaaatctataccagctattgcagaatgcactcctttcaccattttggaacatcaacgctcacagcgtcgtgtatattactcaaggccgtgcccgggttcaagttgtcaacaacaatggaaagacagtgttcaacggcgagcttcgccgcggacagctgcttattataccacaacactatgcagttgtaaagaaggcacaaagagaaggatgtgcttacattgcattcaagaccaatcctaactctatggtaagccacattgcaggaaagagttccatcttccgtgctctcccaaatgatgttctagcaaatgcatatcgcatctcaagagaagaggctcagaggctcaagcataatagaggagatgagttcggtgcattcactccaatccaatacaagagctaccaagacgtttataatgcggcagaatcctcttag

SEQ ID NO: 224 - protein, 503 aa, Oryza sativa
  misc_feature (111)..(111): Xaa = any naturally occuring amino acid
MASINRPIVFFTVCLFLLCNGSLAQQLLGQSTSQWQSSRRGSPRECRFDRLQAFEPIRSVRSQAGTTEFFDVSNEQFQCTGVSVVRRVIEPRGLLLPHYTNGASLVYIIQXGRGITGPTFPGCPESYQQQFQQSGQAQLTESQSQSQKFKDEHQKIHRFRQGDVIALPAGVAHWCYNDGEVPVVAIYVTDLNNGANQLDPRQRDFLLAGNKRNPQAYRREVEERSQNIFSGFSTELLSEALGVSSQVARQLQCQNDQRGEIVRVEHGLSLLQPYASLQEQEQGQVQSRERYQEGQYQQSQYGSGCSNGLDETFCTLRVRQNIDNPNRADTYNPRAGRVTNLNTQNFPILSLVQMSAVKVNLYQLLQNALLSPFWNINAHSVVYITQGRARVQVVNNNGKTVFNGELRRGQLLIIPQHYAVVKKAQREGCAYIAFKTNPNSMVSHIAGKSSIFRALPNDVLANAYRISREEAQRLKHNRGDEFGAFTPIQYKSYQDVYNAAESS

SEQ ID NO: 225 - DNA, 1489 bp, Oryza sativa
atggcaactattgcattctctcgattttctatatgcttttgtgtccttctcctttgccatggttctatggctcagatatttagtctaggcataaatccatggcaaaatcctcgacaagggggttctagggagtgtaggtttgataggctccaagcgtttgagccgcttaggaaagtgaggcatgaagctggggttacagagtactttgatgagaagaatgagcagttccagtgcaccggtacattagtaattcgtcgcattattgagcctcagggccttcttttacctcgatactccaacactcctggcctagtatatatcatccaagggattgacctttcctggttgcccagcaacttaccaaaagcaatttaggcattttggtcttgaaggaggaagccaaaggcaaggaaaaaaattaagagatgaaaaccaaaagatccaccaatttaggcaaggagatgttgttgcacttccttctggtataccacactggttctataatgagggtgacacccctgttgttgctttgtttgtttttgatgtaaacaacaatgctaatcaactcgaaccaagacaaaaggagttcttgttagctggtaacaatatagagcaacaagtgtccaacccctcaatcaacaaacattctgggcaaaacatattcaatggattcaacactaagctattaagtgaggccttaggcgttaacatagaggtgaccagaaggctacaaagtcaaaatgaccgaagaggagatatcattcgagtaaagaatggccttcgattgataaaaccaactatcacacaacaacaggaacaaacacaagatcaataccaacaaattcaatatcatagagagcaacgatcaacaagcaaatacaatggcttggatgagaacttctgtgcaattagggcaaggttaaacatagaaaaccctaatcatgctgatacttacaaccctcgtgctggaaggattacaaatctcaatagccagaagttctccattcttaaccttgtccaaatgagtgctacaagagtaaatctataccagcagaatgctattctctcaccattctggaatattaatgctcacagtttggtgtatacaattcaagggcgtgctcgagttcaggttgttagcaaccatggaaaggctgtatttaatggtgttcttcgtccagggcaattactaattataccacaaaattatgtggttatgaagaaagcagagcttgaaggatttcaatttatcgcgtttaagacaaacccaaatgccatggtaaaccacatcgcggggaagaactcagttctccgtgcaatgcctgtggatgtgatagctaatgcatatcgcatctcaaggcaggaagctcgtagcttgaagaataataggggagaagagattggtgctttcactcctagatatcaacaacaaaaaatccaccaagagtactcaaatccaaacgaaagtgagactcaagaggtgatttaa

SEQ ID NO: 226 - protein, 505 aa, Oryza sativa
  misc_feature (111)..(114): Xaa = any naturally occuring amino acid
  misc_feature (205)..(205): Xaa = any naturally occuring amino acid
  misc_feature (285)..(289): Xaa = any naturally occuring amino acid
MATIAFSRFSICFCVLLLCHGSMAQIFSLGINPWQNPRQGGSRECRFDRLQAFEPLRKVRHEAGVTEYFDEKNEQFQCTGTLVIRRIIEPQGLLLPRYSNTPGLVYIIQGXXXXLTFPGCPATYQKQFRHFGLEGGSQRQGKKLRDENQKIHQFRQGDVVALPSGIPHWFYNEGDTPVVALFVFDVNNNANQLEPRQKEFLLAGXNNIEQQVSNPSINKHSGQNIFNGFNTKLLSEALGVNIEVTRRLQSQNDRRGDIIRVKNGLRLIKPTITQQQEQTQDQYQXXXXXQIQYHREQRSTSKYNGLDENFCAIRARLNIENPNHADTYNPRAGRITNLNSQKFSILNLVQMSATRVNLYQQNAILSPFWNINAHSLVYTIQGRARVQVVSNHGKAVFNGVLRPGQLLIIPQNYVVMKKAELEGFQFIAFKTNPNAMVNHIAGKNSVLRAMPVDVIANAYRISRQEARSLKNNRGEEIGAFTPRYQQQKIHQEYSNPNESETQEVI

SEQ ID NO: 227 - DNA, 561 bp, Oryza sativa; identical to SEQ ID NO: 213

SEQ ID NO: 228 - protein, 186 aa, Oryza sativa; identical to SEQ ID NO: 214

SEQ ID NO: 229 - DNA, 1512 bp, Oryza sativa
  misc_feature (586)..(586): w = adenine or thymine
  misc_feature (593)..(593): k = guanine or thymine
  misc_feature (1471)..(1471): m = adenine or cytosine
atggcatccataaatcgccccatagttttcttcacagtttgcttgttcctcttgtgcgatggctccctagcccagcagctattaggccagagcactagtcaatggcagagttctcgtcgtggaagtccgagaggatgtagatttgataggttgcaagcatttgagccaattcggagtgtgaggtctcaagctggcacaactgagttcttcgatgtctctaatgagttgtttcaatgtaccggagtatctgttgtccgccgagttattgaacctagaggcctactactaccccattacactaatggtgcatctctagtatatatcatccaagagggagaggtataacagggccgactttcccaggctgtcctgagacctaccagcagcagttccaacaatcagggcaagcccaattgaccgaaagtcaaagccaaagccataagttcaaggatgaacatcaaaagattcaccgtttcagacaaggagatgttatcgcgttgcctgctggtgtagctcattggtgctacaatgatggtgaagtgccggttgttgccatatatgtcactgatatcaacaacggtgctawtcaactkgaccctcgacagaggggatttcttgttagctggaaataagagaaaccctcaagcatacaggcgtgaagttgaggagtggtcacaaaacatatttagtggctttagcactgaactgcttagcgaggcttttggcataagcaaccaagttgcaaggcagctccagtgtcaaaatgaccaaagaggagaaattgtccgcgttgaacgcgggctcagtttgctgcaaccatatgcatcattgcaagagcaggaacaaggacaaatgcaatcaagagagcattatcaagaaggaggatatcagcaaagtcaatatgggagtggctgccctaacggtttggatgagaccttttgcaccatgagggtaaggcaaaacatcgataatcctaaccgtgctgatacatacaacccaagagctggaagggttacaaatctcaacagccagaatttccccattcttaatcttgtacagatgagcgccgttaaagtaaatctataccagctattgcagaatgcactcctttcaccgttctggaacatcaacgctcacagcatcgtgtatattactcaaggccgagcccaggttcaagttgtcaacaacaatggaaagacggtgttcaacggagagcttcgtcgtggacagctacttattgtaccacaacactatgtagttgtaaagaaggcacaaagagaaggatgtgcttacattgcattcaagacaaaccctaactctatggtaagccacattgcaggaaagagttccatcttccgtgctctcccaactgatgttctagcaaatgcatatcgcatctcaagagaagaggctcagaggctcaagcataacagaggagatgagttcggtgcattcactcccctccaatacmagagctaccaagacgtttataatgtggcggaatcctcttaa

SEQ ID NO: 230 - protein, 503 aa, Oryza sativa
  misc_feature (111)..(111): Xaa = any naturally occuring amino acid
  misc_feature (196)..(196): Xaa = any naturally occuring amino acid
  misc_feature (491)..(491): Xaa = any naturally occuring amino acid
MASINRPIVFFTVCLFLLCDGSLAQQLLGQSTSQWQSSRRGSPRGCRFDRLQAFEPIRSVRSQAGTTEFFDVSNELFQCTGVSVVRRVIEPRGLLLPHYTNGASLVYIIQXGRGITGPTFPGCPETYQQQFQQSGQAQLTESQSQSHKFKDEHQKIHRFRQGDVIALPAGVAHWCYNDGEVPVVAIYVTDINNGAXQLDPRQRDFLLAGNKRNPQAYRREVEEWSQNIFSGFSTELLSEAFGISNQVARQLQCQNDQRGEIVRVERGLSLLQPYASLQEQEQGQMQSREHYQEGGYQQSQYGSGCPNGLDETFCTMRVRQNIDNPNRADTYNPRAGRVTNLNSQNFPILNLVQMSAVKVNLYQLLQNALLSPFWNINAHSIVYITQGRAQVQVVNNNGKTVFNGELRRGQLLIVPQHYVVVKKAQREGCAYIAFKTNPNSMVSHIAGKSSIFRALPTDVLANAYRISREEAQRLKHNRGDEFGAFTPLQYXSYQDVYNVAESS

SEQ ID NO: 231 - DNA, 1182 bp, Oryza sativa
atggcgggaaaaggaggtaagggcttgctcgccgcgaagacgacggccgccaagtcggcggagaaggacaaggggaagaaggcccccgtctcccgctcgtcccgcgctggtctccaggaaggtggtagtatgccagtggcaccaactgtggtggtttcagctaccatggaagccaaccatgataggactctgttccctgttggccgtatccatcgccagttgaagcaaaggactcaggcaaatggacgtgttggtgctactgccgcagtttactctgctgctattctggagtacttaacagctgaggttctggaactggctgggaacgctagcaaggatctgaaggtcaagcgtatcacccctcgccatctgcagcttgccatccgtggagatgaggagctcgacactctcatcaagggtaccatcgctggtggagtggtcaagagctttgttttctttgtcacttttcattattttacactccaggctgactggatccagcatagatatacggtacgtggaggatggtctactactcaaatccgagctaaagctactaaccctaatgaaaggttatcattctgttccaagtcaattcttgcatcaataaccaatacaagttgcccccctgctgtttatccccagaaacttacttaccctttactttcacccttggctgtcattcagtggtgtgactgtgaaggtggcggagcctgcatggaagggctgacgagcgagcagatggtggcgttccaggaggcgttcttgctcttcgacaagaacggcgatggatgcatcaccttggaagagctggctgcggtgactcgttctcttggccttgagccgaccgatcaggagctcaacgacatgatgagggaagttgatacagatggcaatgggatcatagattttcaggagttcctgagcctcattgccaggaagatgaaggatggggatggcgacgaagagctgaaagaagctttcgaggtcctagacaaggatcagaatggttttatctccccaactgagctgaggacagtgatgaccaatcttggggagaagatgacagacgaggaggttgagcagatgataagggaggcggataccgatggcgacgggcaggtgaactacgatgaatttgtgataatgatgaaaaacgctgaacggaagatatctgggtga

SEQ ID NO: 232 - protein, 393 aa, Oryza sativa
MAGKGGKGLLAAKTTAAKSAEKDKGKKAPVSRSSRAGLQEGGSMPVAPTVVVSATMEANHDRTLFPVGRIHRQLKQRTQANGRVGATAAVYSAAILEYLTAEVLELAGNASKDLKVKRITPRHLQLAIRGDEELDTLIKGTIAGGVVKSFVFFVTFHYFTLQADWIQHRYTVRGGWSTTQIRAKATNPNERLSFCSKSILASITNTSCPPAVYPQKLTYPLLSPLAVIQWCDCEGGGACMEGLTSEQMVAFQEAFLLFDKNGDGCITLEELAAVTRSLGLEPTDQELNDMMREVDTDGNGIIDFQEFLSLIARKMKDGDGDEELKEAFEVLDKDQNGFISPTELRTVMTNLGEKMTDEEVEQMIREADTDGDGQVNYDEFVIMMKNAERKISG

SEQ ID NO: 233 - DNA, 3429 bp, Oryza sativa
atgggtttcgataatgagtgtgttctgaatattcaaactcttcctggtgaatatttctgtcctgtttgtcggacgctcatatgtcccaacgaagctctgcaaactcagtgcacacatctctactgcaaaccctgcttggcttacatagtggcaacaacacaagcctgcccttatgatggctatttggttacagaagctgattccaagggtttgcaacctcaggcgcaagcacaacacactgacagtagtatgatgcagtcatcagcaacaggaacccaggcagccgtgcaaggtccttctgcagtggcctcagcagtccctatgacgcctgttacagcagctcctacaacagtaccatccacaactacagccagagctggaacagattctgctatcgcagttgcttcagctggttcaaccactgtaagcaccgtggctgtggctccttcacttccggtggcacctactgctgctagtcaaggtcaagcacttgctcctcaaactccaacagctgagcaataccagcagcagctccagtaccagcagtactaccagcaacattaccctggatataacccctacatgcagcagtatcaacagtatggtcagtaccaacagtacacacaacctcagacgcaaattgcaccccagaatgtggctcaagctcctgcgcaatctgctccatatgctcagcctcaagttctacagcccaatcagccccaacacatggtgccattccaacctcagaatcagccccaccttacacaactccaagcaccagcagctcagtcacagtctcagcagcatccaccattgcagtctgcagctcaaactcaaattgtacaagcacaaccacaaagccaagtatctttccaacagcctcaaccccatgcacaacctacaacccatacaccagtccctacacaacttggtagccaaccatttgcaatgcctcctactcaagcaacaccatctgaacaccatcaggttatggctcagcaacaacagccacaactgcagcatttacctcagcagcaacatccaaatgcacagcagcaatcttatccacaaatgcaggcatatcatcagcctcctccaatgtctcatgcacaacctcagaatccttcagttcatgcagtaacaggtcatcaatcattttcacagcctcagccagcacatcagatgcaacaaggtgctccactgcaacgttccctacatgtatctcagcagcaaatgcctagtgctcagcatcatgcacttgcacatactccacagggccaacaaccaactatgatggctcaagggattcagcagacaccacaacatcagcatgttgggcatcatgccctgcggccagaaatatatgctagcattcctccacaggcagcaccacaaggattccctctaaacgcacctgctccctcacaaacaggtcaatcataccaacaaggaatgccctcatcacaacaactgatgcatgcacctctccaatcccaaggccaacaatttatgcaacagcaccctactcatacttctgctggtcggtctatgaattatgttgcaccacaagagcagttccaaaatcaatctggtggtccagttaaaggtttacaggcaggtgtgatgaatcaacaaccaccaatgcgtatggcctctgataatgtaggagcaacatctgaattgcatggtgctggacaatcttttgggcagggctcttcgtctttaaaaaaacctacttcggaatctgagaaatcagaaaatgcaactaatggtactggtaatacagaagtaagtgggaaaaatggaagtgctgaatcagctcttgtaaatcctatttcattggatgggtcagatggttcagacaaggggaaggggaaaggaaaagttgacttttcagcttgggaaagtaattcacatgatccagatgctcggggaggcaaagggactaggtctggtatatcaaatgatcttgtgaaaggtggatcattacagcaggcaccacaacatccttatggacctgattcaatgcttcctcaacatatgcgtcagcctgggcatatgccgtatatgcaggggctgccaaatcaaatgaggccacctaaacattcctttcctgaaaatagtcggcctccaatgcaacaaccatttgaaatggcacctagggtgcctggtccaaaccaaaatcagatgcaaatttcacagtccatcagacctgatggtgctatagttcggccaccgatgggggcaccaatgcctgggctgcatgattcaacagttcctccttttgctcctgaatatgttggaactaaaaagaacaatagtgttggcaatggaccacatggaggctcaagggctttatttgaaggtggattcaattcttcacagaaacattccaagtcatgtgcagcaaatcctggcagaaacaacgttagccacaaagattttgaagataatatgaagcagtttccagtgcctactcaccttgacggtgaaggtcatcaaaggggtcctagaccttttgaaggaggtttaggtagacctgatggttttgctgatatattacctggaaggcctccattgacaaatcatcctggtccatttcctataggcttcggagaagattacccaaggaaacccaattcgactgttagttatcctgactttatttcgcctggtgcagaatttggtcatcgtggtattgatggaatacctactcttagaaatgcagggatgacaggcgggcctggaggtttgcataaagatcagctaggctctagtaactttcctgggagtggacaccatgattttgacaactcagagttccctcgtactcgattccatcctggtgatgcttttgtgccaagaaatctgcacggtggtggttggggtggtggccaattgcatggcattgagccttctgactatggctacagaggtcacatgcatgcagatgatccaaatattccaattgattattctcggcatggttttccaaaagaatctgcccactttggttcgggtggacacttgagagatggagatgtcagttggtgccgtatatgcaatattagctgtggtacagtagagaacctgaatatacatgtagagaccagggaacaccatcaacatgcaatggacattgttctgaaaatgaagcaagatgttgcaaaggggagaaagaagttgctggtaatgcttctggaactatctgagaccattgaaattgggtcttgtccatacattttggttaaggaacagagagaccaaatgtcaagccgtcgaggtgcagatggcggcggtcgcagccgtctgccggtgccggagcgggcctcatgggcgacgacgtggctggctgtggctctgttcttgcacggcacaaccgcctgggccgttggtgctgcccgtgggcaggcccaacccgatgtgtag

SEQ ID NO: 234 - protein, 1142 aa, Oryza sativa
MGFDNECVLNIQTLPGEYFCPVCRTLICPNEALQTQCTHLYCKPCLAYIVATTQACPYDGYLVTEADSKGLQPQAQAQHTDSSMMQSSATGTQAAVQGPSAVASAVPMTPVTAAPTTVPSTTTARAGTDSAIAVASAGSTTVSTVAVAPSLPVAPTAASQGQALAPQTPTAEQYQQQLQYQQYYQQHYPGYNPYMQQYQQYGQYQQYTQPQTQIAPQNVAQAPAQSAPYAQPQVLQPNQPQHMVPFQPQNQPHLTQLQAPAAQSQSQQHPPLQSAAQTQIVQAQPQSQVSFQQPQPHAQPTTHTPVPTQLGSQPFAMPPTQATPSEHHQVMAQQQQPQLQHLPQQQHPNAQQQSYPQMQAYHQPPPMSHAQPQNPSVHAVTGHQSFSQPQPAHQMQQGAPLQRSLHVSQQQMPSAQHHALAHTPQGQQPTMMAQGIQQTPQHQHVGHHALRPEIYASIPPQAAPQGFPLNAPAPSQTGQSYQQGMPSSQQLMHAPLQSQGQQFMQQHPTHTSAGRSMNYVAPQEQFQNQSGGPVKGLQAGVMNQQPPMRMASDNVGATSELHGAGQSFGQGSSSLKKPTSESEKSENATNGTGNTEVSGKNGSAESALVNPISLDGSDGSDKGKGKGKVDFSAWESNSHDPDARGGKGTRSGISNDLVKGGSLQQAPQHPYGPDSMLPQHMRQPGHMPYMQGLPNQMRPPKHSFPENSRPPMQQPFEMAPRVPGPNQNQMQISQSIRPDGAIVRPPMGAPMPGLHDSTVPPFAPEYVGTKKNNSVGNGPHGGSRALFEGGFNSSQKHSKSCAANPGRNNVSHKDFEDNMKQFPVPTHLDGEGHQRGPRPFEGGLGRPDGFADILPGRPPLTNHPGPFPIGFGEDYPRKPNSTVSYPDFISPGAEFGHRGIDGIPTLRNAGMTGGPGGLHKDQLGSSNFPGSGHHDFDNSEFPRTRFHPGDAFVPRNLHGGGWGGGQLHGIEPSDYGYRGHMHADDPNIPIDYSRHGFPKESAHFGSGGHLRDGDVSWCRICNISCGTVENLNIHVETREHHQHAMDIVLKMKQDVAKGRKKLLVMLLELSETIEIGSCPYILVKEQRDQMSSRRGADGGGRSRLPVPERASWATTWLAVALFLHGTTAWAVGAARGQAQPDV

SEQ ID NO: 235 - DNA, 1531 bp, Oryza sativa
atggcgaccatagctttctctcggttatctatctacttttgtgttcttctcctatgccatggctctatggcccagctatttggtccgaacgtaaatccatggcacaaccctcggcaaggaggttttagggagtgtagatttgatagactacaagcatttgaaccacttcggagagtgaggtcagaagccggggttacagagtactttgatgagaagaatgaacaattccagtgcacaggtacatttgtcatccgacgtgtcattgagcctcaaggccttctggtacctcgatacagcaatactcctggcatggtctacatcatccaagagggagaggttctatgggattaactttccccggctgcccagcaacctaccaacaacaattccaacaattcttgcctgaaggccaaagccagagccaaaaatttagggatgagcaccaaaagatccaccaatttagacaaggagatatcgttgcactgccagctggtgttgcgcattggttctacaatgaaggcgatgcaccagttgttgctctatatgtcttcgacttaaacaacaacgctaatcagcttgaaccaaggcagaagaggagttcttattggcgggtaacaacaacagggagcaacaaatgtatggtcgctcaatcgagcaacactctgggcaaaacatatttagcggtttcaacaatgagctactaagtgaggccttaggcgtcaatgcattggtagcaaagaggctacaaggccaaaacgaccaaagaggagagatcatacgggtaaagaatggccttaaactgttgagacctgcttttgcacaacaacaggaacaagcacaacagcaggaacaagcacaagctcaataccaagttcagtacagtgaagaacaacaaccatctacgcgttgcaacggtttagatgagaacttctgcacaatcaaggcaaggttgaacatcgaaaatcctagccatgctgatacttacaacccacgtgctggaaggatcacacgtctcaacagtcagaagttccccattcttaaccttgtacaattgagtgctactagagtaaatctataccagcagaatgctattctctctccgttttggaacgttaatgcccatagcctggtgtatatcgttcaagggcatgctcgagttcaggtcgttagtaaccttggaaagacggtattcaatggcgttctacgtccaggtcaattgctgatcattccgcaacactacgttgtcttgaagaaagcagagcatgaaggatgccaatacatttcattcaagaccaatgcaaactccatggtgagccaccttgcagggaagaactcaatattccgtgccatgccagtggatgtgatcgctaatgcttaccgcatatcgagggagcaagcacgaagccttaagaataataggggagaagagctcggtgccttcactcctagatatcaacaacagacctacctaggcttctcaaatgagtcggagaacgaggcctcagagtgatgtactaatgaaatagtatag

SEQ ID NO: 236 - protein, 510 aa, Oryza sativa
  misc_feature (1)..(510): Xaa = any naturally occuring amino acid
MATIAFSRLSIYFCVLLLCHGSMAQLFGPNVNPWHNPRQGGFRECRFDRLQAFEPLRRVRSEAGVTEYFDEKNEQFQCTGTFVIRRVIEPQGLLVPRYSNTPGMVYIIQEGEVLWDXLSPAAQQPTNNNSNNSCLKAKARAKNLGMSTKRSTNLDKEISLHCQLVLRIGSTMKAMHQLLLYMSSTXTTTLISLNQGRRGVLIGGXQQQGATNVWSLNRATLWAKHIXRFQQXATKXGLRRQCIGSKEATRPKRPKRRDHTGKEWPXTVETCFCTTTGTSTTAGTSTSSIPSSVQXRTTTIYALQRFRXELLHNQGKVEHRKSXPCXYLQPTCWKDHTSQQSEVPHSXPCTIECYXSKSIPAECYSLSVLERXCPXPGVYRSRACSSSGRXXPWKDGIQWRSTSRSIADHSATLRCLEESRAXRMPIHFIQDQCKLHGEPPCREELNIPCHASGCDRXCLPHIEGASTKPXEXXGRRARCLHSXISTTDLPRLLKXVGERGLRVMYXXNSI

SEQ ID NO: 237 - DNA, 441 bp, Oryza sativa
atggtggccgcgacagccgagttcaggcgagtgttctccgcgttcgaccgcgacgccgacggcaagatctcggcggcggagctgcggctctgcatgaaggccgcgctcggcgaggacatgtccgccgaggaggccgaggcgctcgtctcgtcggcggacaccgacgacgacgggctgctcgacgaggaggagttcacgaagctggcggtgcagcttgagatgggagacgaggaggagaggtgcaggggactaatggaggcgttccggatgtacgagatggaaggggaggggcgcatcactccggcgagcttgaaacggatgctgagcaagctcggatcgcatcagggcatcgaggagtgccaaacaatgatctgcaggtttgacctcgatggagatggagtcatcagctttgaggagttcaagatcatgatggatgcatag

SEQ ID NO: 238 - protein, 146 aa, Oryza sativa
MVAATAEFRRVFSAFDRDADGKISAAELRLCMKAALGEDMSAEEAEALVSSADTDDDGLLDEEEFTKLAVQLEMGDEEERCRGLMEAFRMYEMEGEGRITPASLKRMLSKLGSHQGIEECQTMICRFDLDGDGVISFEEFKIMMDA

SEQ ID NO: 239 - DNA, 1636 bp, Oryza sativa
atgtggacattaacaaactctatcttaacatctagtcgatcactactttacttcactataaaaggaccaacatatatcaccatttctcacaaaagcattgagttcagtcccacaaaaacatggcaaccatcaaattccctatagttttctccgtcgtttgcttgttcctcttgtgtaatggttcgttagcccaacttcttagccaaagtactagtcaatggcaaagttctcgccgtggaagtccaagagagtgcagatttgatcggttgcaagcatttgagccgattcgcactgtaaggtcccaagctggtacaactgagttttttgatgtctctaatgagttgtttcaatgtactggagtatttgttgtccgtcgagttatcgaacctagaggtcttctgttacctcactactccaatggagcaactttggtatatgtcatccaagaggcagaggtataacaggaccaactttcccaggatgtcctgagacctatcaacaacagtttcagcaatccgagcaagaccaacaattggaaggccaaagccaaagccataaatttagagatgaacatcaaaagatccaccgttttcaacagggggatgtagttgcattgcctgctggtgttgctcattggtgctacaatgatggtgatgcaccaattgttgccatatatgtcactgatatatacaatagtgctaaccaacttgatcctagacacaggggatttctttttagctggcaacaataagataggtcaacaattgtatagatatgaggcaagggacaattcgaagaacgtctttggtggatttagtgttgaactacttagcgaggctcttggcataagcagtggagtagcaagacaactccagtgccaaaatgaccaaagaggagaaatagttcgtgttgagcatgggctttccttgctccaaccatatgcatcgttgcaagagcaacaacaagaacaggtgcaatcgagagactatggccaaacacaatatcaacaaaaacaacttcaaggtagttgctctaatggtttggatgagaccttttgtaccatgagggtaaggcaaaatatcgacaacccaaacctcgcagatacatacaaccccagagcaggaaggatcacatatctaaatggccaaaagttccccattcttaatcttgtacagatgagtgccgttaaagtaaatttatatcagcagaacgcactcctttcacctttttggaacatcaacgctcatagtgtcgtgtatattactcaaggtcgtgcccgagttcaagtcgtcaacaacaatggaaagacagtgttcgatggagagctccgtcgtgggcagcttctaattataccacaacaccatgtagtcattaaaaaggcacaaagggaaggatgctcatatattgcattgaaaaccaaccctgactccatggttagccacatggcaggaaagaattccatcttccgcgcacttcctgacgatgttgtagcaaatgcatatcgtatctcaagagaagaagctaggaggctcaagcacaacaggggagatgagttaggtgtgttcactcctagtcatgcctacaagagctaccaagacatatctgtgagtgcataaccaagaaatgtcaatcatag

SEQ ID NO: 240 - protein, 545 aa, Oryza sativa
  misc_feature (1)..(545): Xaa = any naturally occuring amino acid
MWTLTNSILTSSRSLLYFTIKGPTYITISHKSIEFSPTKTWQPSNSLXFSPSFACSSCVMVRXPNFLAKVLVNGKVLAVEVQESADLIGCKHLSRFALXGPKLVQLSFLMSLMSCFNVLEYLLSVELSNLEVFCYLTTPMEQLWYMSSKRQRYNRTNFPRMSXDLSTTVSAIRARPTIGRPKPKPXIXRXTSKDPPFSTGGCSCIACWCCSLVLQXWXCTNCCHICHXYIQXCXPTXSXTQGISFXLATIRXVNNCIDMRQGTIRRTSLVDLVLNYLARLLAXAVEXQDNSSAKMTKEEKXFVLSMGFPCSNHMHRCKSNNKNRCNRETMAKHNINKNNFKVVALMVWMRPFVPXGXGKISTTQTSQIHTTPEQEGSHIXMAKSSPFLILYRXVPLKXIYISRTHSFHLFGTSTLIVSCILLKVVPEFKSSTTMERQCSMESSVVGSFXLYHNTMXSLKRHKGKDAHILHXKPTLTPWLATWQERIPSSAHFLTMLXQMHIVSQEKKLGGSSTTGEMSXVCSLLVMPTRATKTYLXVHNQEMSII

SEQ ID NO: 241 - DNA, 405 bp, Oryza sativa
atggcagcatacaccagcaagatctttgccctgtttgccttaattgctctttctgcaagtgccactactgcaatcaccactatgcagtatttcccaccaacattagccatgggcaccatggatccgtgtaggcagtacatgatgcaaacgttgggcatgggtagctccacagccatgttcatgtcgcagccaatggcgctcctgcagcagcaatgttgcatgcagctacaaggcatgatgcctcagtgccactgtggcaccagttgccagatgatgcagagcatgcaacaagttatttgtgctggactcgggcagcagcagatgatgaagatggcgatgcagatgccatacatgtgcaacatggcccctgtcaacttccaactctcttcctgtggttgttgttga

SEQ ID NO: 242 - protein, 134 aa, Oryza sativa
MAAYTSKIFALFALIALSASATTAITTMQYFPPTLAMGTMDPCRQYMMQTLGMGSSTAMFMSQPMALLQQQCCMQLQGMMPQCHCGTSCQMMQSMQQVICAGLGQQQMMKMAMQMPYMCNMAPVNFQLSSCGCC

SEQ ID NO: 243 - DNA, 450 bp, Oryza sativa
atgaagatctttgtcatcctctctctcctcgccctcgcagcgagcagcgcctcggcacagtttgatgcttgcacctatgggcaatgccagcagcagccgtttatgcaaccgatcatgaacccgtgcaatgagttcgtgaggcaacagtgcagcccgatgagcctaccttgggagcagtcacgcaggctacaactgagcagctgccaggtgatgcggcagcaatgctgtcagcagatgaggttgatggcgcaacaatatcattgccaggctatttgcaccatggtgcagtctatcatgcagcaagtgcagtttgatgctggctttgttggcgagccccaagctcaggcccaggcccaggtggctctcaatttgccctccatgtgtggagtctaccctaggtactgcagcactccatgcaaagttgctactggtcattgcggttcttggtag

SEQ ID NO: 244 - protein, 149 aa, Oryza sativa
MKIFVILSLLALAASSASAQFDACTYGQCQQQPFMQPIMNPCNEFVRQQCSPMSLPWEQSRRLQLSSCQVMRQQCCQQMRLMAQQYHCQAICTMVQSIMQQVQFDAGFVGEPQAQAQAQVALNLPSMCGVYPRYCSTPCKVATGHCGSW

SEQ ID NO: 245 - DNA, 2844 bp, Oryza sativa
atggagggggaggaggggaggaaggggaaggaggcactgagcggggggcacctctgccacgtgtgcgggtaccagtaccccaacgcgaaccctagcgcgaagctccgccgctcccaccggaagaactgcgggaaggcgccggccgcggacgagcgggaggagggggaggaggtggacgccgacatggagcgcaatgcgggggaggggctcctgccagttagagcaggaggaggtgagtcggaggggaatgcaggctctccatcgctcggatctgcgagaggagatgctgatttggtggaggtgaaggagattgcagagaggctgaaaaaggcaaaaagtatggctgccttttgctcatcagtcccccccttggagagggacaggaaactcacatggcatagtgagatggtactgttctgggaacatgcttctccaaacgttaccggagttcaagtcatcactggttactgcagtgaagctggtgtgattaattgcgcaagtcattctgatgaaatttcaaaagaagttggacgtccggctgaacgagaagatagtcttgatgagtaccaggacgcgtctccttttcttcatcaaccagattctgaagttggtgcagcagtagcacataagtcagatttttctattgaagaaattaagaatttggatagtgtttcaccagcagcaagtgtagcagcaaatgaaatttctgtggaaatggatggagtatcgaaagatcagttatcaggacaacccaatatgactaatttatctggtgaatccatagttggaaaagaagttgagcctactgtgatgcttgagagttcagatgaattctcagttaatgttcacagtgataatacatatattgttgacagcaaacctgataagacatctgagtttattggtgatgtgaatggttcaacttcatttatttctgacctaacatcccaatctacaagtcccataatggttgaaagcttgatggaagatagcatggatgctctgcacatcatatctgaagtatcaccaagtttggaagaaaaagcaggatcagccaatgctgaatctgtaacagaaaattccagaattgactttgtgcaaactgaagatcaactgaagctcaccaatgctgtaaataccttgacagattgctcttcacagtacaagtgtgttaaagatactttagatgcccagctgcctgttgagaatccgttcctgggtaattcagtatgttctttagatggtcatcagagtgaccatgttgttactaatatggatagcatgtggggttctgatgatgaagatatttgtagtgaaggcatcaaagcgaagggcagtgagttgggtttttcttgtgaggagaacccacaacatgtcgagttggttgataaagcagatgaaaatccttctgtagagaagcctaatggattatcagaagaggtggtctgcagcaaagagattggccctgaggttcctattataggccaggtctctgcaagtcagcatgttgccttactaatggatcaagtgtccacaaagaatccgttcattctagatgataccaggagcgacgacttatttgagcttccaactgagaattaccattcggaagcacaaaatgttgctgaatcaaagctgcaagttgactttacacctctgccattggatcagctgataattgtggaccaaactagcattgctgaaggccagcaatttgtcatctcaggtgatcgtgtaccagctatctcaagtacctgtggaaatgaacctgcagttggcacagaggatgtgtctgtcagtagcacttctgatcctgcgaagaacatttccttgcatgatgcctcagtgaacaatagcagacaggaagacggggagcctacaagtggcatcaattttgtgccatctgaagtatttcttccagcagagtttagcacaatgcctacttctcaggatatcaatgctctcaagaatgatggtaacgagaagacgccacttgaagacataagcaccaaggatatgactgcatcacttagtgaagataatgttgaagaaaagaaagagaccgaaggcactagtgtgaaggagatgaattcaatactgaaagcagacaatgttgaagaagagaagttgactgatgacacgagtgcagagaggaatgcaatgcagcacatagatgacgctgaaaagaagcaggctgctgacactgtttcgagggaaacgagtgctctacaaaacatagaagaaagggaaaacgttgaaggtactggtgctaagggagtgccagcagtagggagcttggaaaatgctgatgcggagaatcagactgaagacaccagtgcaaagacagaatgtaaatcagataatgctgacaacaagaagcagagttacgacacaagcacagaggagatgaatgccaagaatcaagctcaagatacttcctcaaaggagatgaacaccatacaaaacacatctaatgctgaagaaaagaaccaaactgaagacccagctgtccaggagggaaacaagcagaaggaaggcatctctcccacagtagcgaagcagagttcagaaagagttcatgtccctctcaaggtgctcctagccgaggcgagtgtggagacgaaagaaaagaaaaccactgccaaggagcgtgttttgtcattcaggcgccgagtatcgaaggacgactcatcgtcggccaagtccgggtccccaaaacctggtgctgatgacaacaaattctggagctccccagcaagattgcccgagaacaatgctgagaagaaatccaaagcaaggaagcagccatggatgccgttcatttgctgtcactcggtgcactaa

SEQ ID NO: 246 - protein, 947 aa, Oryza sativa
MEGEEGRKGKEALSGGHLCHVCGYQYPNANPSAKLRRSHRKNCGKAPAADEREEGEEVDADMERNAGEGLLPVRAGGGESEGNAGSPSLGSARGDADLVEVKEIAERLKKAKSMAAFCSSVPPLERDRKLTWHSEMVLFWEHASPNVTGVQVITGYCSEAGVINCASHSDEISKEVGRPAEREDSLDEYQDASPFLHQPDSEVGAAVAHKSDFSIEEIKNLDSVSPAASVAANEISVEMDGVSKDQLSGQPNMTNLSGESIVGKEVEPTVMLESSDEFSVNVHSDNTYIVDSKPDKTSEFIGDVNGSTSFISDLTSQSTSPIMVESLMEDSMDALHIISEVSPSLEEKAGSANAESVTENSRIDFVQTEDQLKLTNAVNTLTDCSSQYKCVKDTLDAQLPVENPFLGNSVCSLDGHQSDHVVTNMDSMWGSDDEDICSEGIKAKGSELGFSCEENPQHVELVDKADENPSVEKPNGLSEEVVCSKEIGPEVPIIGQVSASQHVALLMDQVSTKNPFILDDTRSDDLFELPTENYHSEAQNVAESKLQVDFTPLPLDQLIIVDQTSIAEGQQFVISGDRVPAISSTCGNEPAVGTEDVSVSSTSDPAKNISLHDASVNNSRQEDGEPTSGINFVPSEVFLPAEFSTMPTSQDINALKNDGNEKTPLEDISTKDMTASLSEDNVEEKKETEGTSVKEMNSILKADNVEEEKLTDDTSAERNAMQHIDDAEKKQAADTVSRETSALQNIEERENVEGTGAKGVPAVGSLENADAENQTEDTSAKTECKSDNADNKKQSYDTSTEEMNAKNQAQDTSSKEMNTIQNTSNAEEKNQTEDPAVQEGNKQKEGISPTVAKQSSERVHVPLKVLLAEASVETKEKKTTAKERVLSFRRRVSKDDSSSAKSGSPKPGADDNKFWSSPARLPENNAEKKSKARKQPWMPFICCHSVH

SEQ ID NO: 247 - DNA, 1620 bp, Oryza sativa
  misc_feature (199)..(199): m = adenine or cytosine
  misc_feature (1512)..(1512): w = adenine or thymine
  misc_feature (1514)..(1514): y = cytosine or thymine
  misc_feature (1547)..(1547): r = adenine or guanine
  misc_feature (1567)..(1567): r = adenine or guanine
  misc_feature (1612)..(1612): y = cytosine or thymine
atgtcgtcaccatctgacattgttaaagacattgttatacctgccaaggttgaagatctgtctaaagagcacaaggcagagatggagcagaagatgcaacaactgaaggaagcatatcttaattctttttcagtgactcagcaaggaaaaggttcaactttaatcagtttcaacctccatcacctctacagtatcggcmgggatacacctccttttgtccaagctccagcacaaccaatgtacaatcaatatgaacaacaaaatcaagggggagttcaacaacaacctttagccgatataattgcagatgtggtgagggaacagtttggaatcaaacctaaagacaatgggatcatgtatcggcatccgtatccagaatattttgatagagttccattgccaagccgatacaagaccccagatttctcaaagttctcaggacaagataatgttactacatatgagcatatcagccgatttcttgcacaaagtggtgaagcatcggctattgaagctttgagagttagcggtgctcaagagatgaagttatcatatttgacagcaattcggcaaaagtctgatgaatcggttccatattatattcagagatttagagatgtgatgaacagatacttcagtttaaatttgaccgattcacagaaggtatcggctcatgagcaatgtttccaagaggccaagaagttcaagaaagttaactatgtctacaattatgtttctgattctgaagaggaagactcggagatcagtttggctgagtggcccaagattaagaagaaaactatgtgtcgatgggtcaaggatataaacaaggaagagaaatatgactttgatatcaataaagccgacaagatctttgatttactgttgcaagaaaagcaaattcagttgccagtaggtcacgttctgccatcggctgaagagctgaagaagaggaagttttgcaagtggcacaatatagtatctcatcataccaatgagtgcaaagtgttcagcagaagattgatcaacaagtaccagaagaggcatgacatcaagttcagaggaattttcagaattgtagtcatcaccaagatgatatatattatcaagatgaccaagatgaagaatattatcaaggttttgttggaacgatggaatgaggttgccatcaatcaacaattgccctgggtgtggtggatcgaattcttacaatcagtcttcccaggaatttttacaaggagtcagaaaaggagagttcagagattgagaaatagagagcagatacaggaagttaatgaggaaatcgatcatcggctgaaacgtacaaggaaagagtggcgagttgaatcgaagattgtgctagccaatgaggttgaaaacgataaggaaaggaatagaatttcaacatatgccgagggaaaagcaattgcttcaacttcgatcaatatgccactttatatcaaaggttatgtcaatggcaagccgatgtctaagatgctagtcgatggaggwgytgatgtcaatttgatgccttatactactttcaraaagtttggccggtttgaargagatttgatcaagacaaatattgtattgaagatctttggggcaytcttctga

SEQ ID NO: 248 - protein, 539 aa, Oryza sativa
MSSPSDIVKDIVIPAKVEDLSKEHKAEMEQKMQQLKEAYLNSFSVTQQGKGSTLISFNLHHLYSIGRDTPPFVQAPAQPMYNQYEQQNQGGVQQQPLADIIADVVREQFGIKPKDNGIMYRHPYPEYFDRVPLPSRYKTPDFSKFSGQDNVTTYEHISRFLAQSGEASAIEALRVSGAQEMKLSYLTAIRQKSDESVPYYIQRFRDVMNRYFSLNLTDSQKVSAHEQCFQEAKKFKKVNYVYNYVSDSEEEDSEISLAEWPKIKKKTMCRWVKDINKEEKYDFDINKADKIFDLLLQEKQIQLPVGHVLPSAEELKKRKFCKWHNIVSHHTNECKVFSRRLINKYQKRHDIKFRGIFRIVVITKMIYIIKMTKMKNIIKVLLERWNEVAINQQLPWVWWIEFLQSVFPGIFTRSQKRRVQRLRNREQIQEVNEEIDHRLKRTRKEWRVESKIVLANEVENDKERNRISTYAEGKAIASTSINMPLYIKGYVNGKPMSKMLVDGGADVNLMPYTTFTKFGRFERDLIKTNIVLKIFGALF

SEQ ID NO: 249 - DNA, 648 bp, Oryza sativa
atggtcgctgctgagctaccccttgtgactgttgctgcatgggctcgaactgaccatattgaggcgcaaactgaggttgagccaatccccctagctgatattgggcttgcggggaaggaggctgatattggtaattcaagttacccccttggtaattatgaaggttcggctggatattacgtaccaaatgctcaggaacaacttgaggtattactgtgccatccggctgtacgtggtgaaccaagtgttctgggacaacttgatttaaaaattgttgtacaggctgaccaccaggcgttgcaaacccggccgatgcacctattgaaccttggtgctggaccggctgaacgatttgctgtcttaacggcgtctgctgaatcggctgcagaggctgctgccttggtggtgtttgctgaactggttgaggcggcagaaacgtggcatgtcacgaccggaaataacccaacgggcgttccttacgtgcgtgtattattccttgtcccaggagccaaggcgcttgacggcaggcacgagctagaaaccaaagccttcatcatccaggaactccttttctgggtttgggaaaaaatgagcaagactaagtacaaccaccgtactcaacaagacacacccacaagtgcagaataa

SEQ ID NO: 250 - protein, 215 aa, Oryza sativa
MVAAELPLVTVAAWARTDHIEAQTEVEPIPLADIGLAGKEADIGNSSYPLGNYEGSAGYYVPNAQEQLEVLLCHPAVRGEPSVLGQLDLKIVVQADHQALQTRPMHLLNLGAGPAERFAVLTASAESAAEAAALVVFAELVEAAETWHVTTGNNPTGVPYVRVLFLVPGAKALDGRHELETKAFIIQELLFWVWEKMSKTKYNHRTQQDTPTSAE

SEQ ID NO: 251 - DNA, 2378 bp, Oryza sativa
  misc_feature (34)..(34): r = adenine or guanine
  misc_feature (37)..(37): r = adenine or guanine
  misc_feature (40)..(40): r = adenine or guanine
  misc_feature (46)..(46): r = adenine or guanine
  misc_feature (102)..(102): s = guanine or cytosine
  misc_feature (1196)..(1196): m = adenine or cytosine
  misc_feature (1478)..(1478): m = adenine or cytosine
  misc_feature (2005)..(2005): s = guanine or cytosine
  misc_feature (2011)..(2011): k = guanine or thymine
  misc_feature (2017)..(2017): r = adenine or guanine
atgccggggaggaagaagaaggaggaggaggagragragraggatracgatggggaagaggagtacgaggtggacgtggtgcgcgaccggatcgggtcgtcscgggggagccgcaggtggtatcggttatggacgaggttcatactagtgtgggcagtgtacagttccttcttcacgccattggaatttggcttcttcagggggctccccaggaacctcttcttcctagacatagctggtcagatcgccttcctcatcgacattgttctcaggttcttcgtggcctaccgtgatcctgacacctaccgcatggttcacaatcccacctccatcgctctccgagatattgtaaatcaagcttcatttttgatcttcttggttgttttccgtgggatgctatctataaggcttgtggaagtaaagaagaagtaagatacctattgtggattcggttgacacgagctatgaaggtgacagagttcttcaggagcatggaaaaagatatccgtataaattacctgtttactaggattgtgaaactcatagttgtggaactctactgtacgcacacagcagcatgtatcttctactatcttgcaacaacacttcctgaatcaatggaaggatatacatggatagggagcttgcagttgggagactatagttattctcatttcagggagattgatcttaccaagcgttatatgacatcgctgtactttgccatagtcaccatggcaactgttgggttatggtgacattcatgctgtgaatgtcagggagatgatattcatcatgatttatgtttcctttgatatgattcttggagcctacctcattggtaacatgactgcacttattgtcaagggctcgagaaccgagcgattcagggataagatgaaagaagttatcaggtacatgaacagaaacaagcttggaaaggacataagggaacagattaaaggacatttgaggttgcagtatgaaagcagctacactgaagcttctgtccttcaggatatcccagtctcaattcgtgcgaagatttcacaaacactgtataagccatatatcgaaagcattccactgtttaaaggatgttcagcagaattcattcaacagattgtgatcaggctgcaggaagagttcttcctacccggagaggttattttggagcagggaagtgcagttgatcmactgtactttgtctgtcatggggcactggaagatggtcaagaagagaccattctaatgctagagcctgaaagttcttttggagaaatcgctgttctctgcaatatcccacaacccttcaccgttcgtgtctgcgaactttgtcgtcttttgcggcttgacaagcaatccttcacaaacatcctggagatcttcttcgttgatggaagaagaattctgagcaacctttctgagagccggatcaagcagctggaatccgacatcacgttccacatcgggaagcmagaggcagagctgacgctgcgagtgaacaacgctgcgttctacggtgacatgcatcagctcaagagcctgatccgtgcaggagccgatcccaagaacaccgattacgacgggcgatctcctctggcatcttgcggcttgcaaagggttcgaagatgtcgtccagttcctcctccacgaaggcgtcgacatcgatctttccggacaaatttggcaacacgccattgctggaggcggtgaagcaggggcacgaccgggtggcgacgctgctgttcagcaagggggcgaagctgagcctggagaacgccgggagccacctgtgcacggcggtggcgaggggcgacacggacttcgtccggcgggcgctcgcctacggcggcgacccgaacgcgagggactacgaccaccgcgcgccgctccacatcgccgccgccgagggcctctacctgatggcgaagctgctcgtcgacgccggcgccagcgtgttcgccaccgaccggtggggcacgacgccgctggacgaagggcscaggtkcgggarccggacgatggtgcagctgctggaggcggccaagtccggcgagctctccaggtacccggagcgcggcgaggaggtgcgggacaagatgcacccgcggcggtgctccgtgttcccgcaccacccgtgggacggcggcgagcggcggcgggaaggggtggtggtgtggatcccgcacaccatcgaggggctcgtcagctcggcgcaggagaagctcggcctcgccggctccggcgaggggctccggctgctcggcgaggacggcgccagagtgctcgacgtcgacatggtccacgacgggcagaagctctacctcgtcgtcggcggcggcggcgatgacggcggcacggaggcaaggcagtga

SEQ ID NO: 252 - protein, 792 aa, Oryza sativa
  misc_feature (12)..(14): Xaa = any naturally occuring amino acid
  misc_feature (16)..(16): Xaa = any naturally occuring amino acid
  misc_feature (399)..(399): Xaa = any naturally occuring amino acid
  misc_feature (493)..(493): Xaa = any naturally occuring amino acid
  misc_feature (669)..(669): Xaa = any naturally occuring amino acid
  misc_feature (671)..(671): Xaa = any naturally occuring amino acid
  misc_feature (673)..(673): Xaa = any naturally occuring amino acid
MPGRKKKEEEEXXXDXDGEEEYEVDVVRDRIGSSRGSRRWYRLWTRFILVWAVYSSFFTPLEFGFFRGLPRNLFFLDIAGQIAFLIDIVLRFFVAYRDPDTYRMVHNPTSIALRDIVNQASFLIFLVVFRGMLSIRLVEVKKKXDTYCGFGXHELXRXQSSSGAWKKISVXITCLLGLXNSXLWNSTVRTQQHVSSTILQQHFLNQWKDIHGXGACSWETIVILISGRLILPSVIXHRCTLPXSPWQLLGYGDIHAVNVREMIFIMIYVSFDMILGAYLIGNMTALIVKGSRTERFRDKMKEVIRYMNRNKLGKDIREQIKGHLRLQYESSYTEASVLQDIPVSIRAKISQTLYKPYIESIPLFKGCSAEFIQQIVIRLQEEFFLPGEVILEQGSAVDXLYFVCHGALEDGQEETILMLEPESSFGEIAVLCNIPQPFTVRVCELCRLLRLDKQSFTNILEIFFVDGRRILSNLSESRIKQLESDITFHIGKXEAELTLRVNNAAFYGDMHQLKSLIRAGADPKNTDYDGRSPLASCGLQRVRRCRPVPPPRRRRHRSFRTNLATRHCWRRXSRGTTGWRRCCSARGRSXAWRTPGATCARRWRGATRTSSGGRSPTAATRTRGTTTTARRSTSPPPRASTXWRSCSSTPAPACSPPTGGARRRWTKGXGXGXGRWCSCWRRPSPASSPGTRSAARRCGTRCTRGGAPCSRTTRGTAASGGGKGWWCGSRTPSRGSSARRRRSSASPAPARGSGCSARTAPECSTSTWSTTGRSSTSSSAAAAMTAARRQGS

SEQ ID NO: 253 - DNA, 939 bp, Oryza sativa
atggacacacgattataccaccactactccactaccctccgcctcctctcccacctccagcgccgcacctccacctccacctccctccccgtccccgtcgtcagcgtcggcaacctcacctggggagggaatggcaagacccccatggtcgacttcctcgcccgcgccttccaccgcatcggcgtctcgcccctcatcctaaccaggggctacgcaggcggcgatgaatccaggatgctccgccgccgcctctccgatacctccgccaagattggtgtcggtcccaatagagcggctgtcgctacctccatgctccgcaaatatggtgctcaaattggagtcgccatactagacgatgggatgcagcacctcagcttgcttcgagatgttgacattgtcatgatcaacgccctcaatccttgggggaacaaacatctcattccacgaggacccatgagggaaccactcactgcactcaccagagctcatattctcctcattcatcatgctaacctggtttctcaaccacaacttaaaacaattctttccacggtccacgacaatggcgcaacatgtccagtcttctttagtaaattggtaccatcgcatatttttcaagtcaaccaacccatgcacaggcttcctcttcatgtgctgcacggtataatcgtgctatgcgtttctgctattggctgcccagatgctttcattcattctgttcaagaggacctgcagcttatccaagacacgttgaagaagcttgtgtatcagcacaaaaataatgctgttgtcttggttacagagaaggattatgaccgtgatccagatgtccttagggcactggatgcaaaggtttgggtgttgtcgtcttgtctgcaaattataccccatgagggacaaggagatgatgaatttatgaggaaaaatatgcattattga

SEQ ID NO: 254 - protein, 312 aa, Oryza sativa
MDTRLYHHYSTTLRLLSHLQRRTSTSTSLPVPVVSVGNLTWGGNGKTPMVDFLARAFHRIGVSPLILTRGYAGGDESRMLRRRLSDTSAKIGVGPNRAAVATSMLRKYGAQIGVAILDDGMQHLSLLRDVDIVMINALNPWGNKHLIPRGPMREPLTALTRAHILLIHHANLVSQPQLKTILSTVHDNGATCPVFFSKLVPSHIFQVNQPMHRLPLHVLHGIIVLCVSAIGCPDAFIHSVQEDLQLIQDTLKKLVYQHKNNAVVLVTEKDYDRDPDVLRALDAKVWVLSSCLQIIPHEGQGDDEFMRKNMHY

SEQ ID NO: 255 - DNA, 876 bp, Oryza sativa
atggagcgcgcagtgcgggagctgtgggcggagtcgcgggacctgctgggcctccactccccggacgacgccgccgccgccgacgccgcgatgccccgcgccgagatgcccccgacgccgctcgcgtttctccgcgaccacgtctcgccggggcgccctctcctcgtgtcctccgccgccaccagccactggccggccgcctcgctgtggccgaccgactcctacctcaccgacgcgctccgctccaccgccgtctcgctccacctcacccccgacggccgcgccgaggccttggcccgcaaccgggcccgagccaccccggggccaagccgtcaacctctggatcggcagcgcctgctcccagacctccttccacaaggaccactacgacaacatctacgtcgtcgtctccggcgagaagcacttcctcctcttgcccccaccgagcaccaccgcctctacgtccgcgactaccccgccgcccactacgccgcggaagatgaagcggagctgaggcttaagctggagctggaggagcccgagaggatcgtgccatggagcagcgttgaccctacccgccgtcgccggaggagccggccgcgcaggcgtcatccttcccgctctacttcgagggccgaggccgatccgctgcacggtgcgcgccggcgagatgctctacttgccgagcatgtggtttcaccatgtgagcagagccccgggccgaacgggctcaccattgcagtgaactactggtatgacatgcagtttgacattaagtatgcctacttcaacttcttgaggtcattggagatcgatggtagttcgtcgaaaaagacggatgctttggaagacgatctcgaggagacgaatgattga

SEQ ID NO: 256 - protein, 291 aa, Oryza sativa
MERAVRELWAESRDLLGLHSPDDAAAADAAMPRAEMPPTPLAFLRDHVSPGRPLLVSSAATSHWPAASLWPTDSYLTDALRSTAVSLHLTPDGRAEALARNRARATPGPSRQPLDRQRLLPDLLPQGPLRQHLRRRLRREALPPLAPTEHHRLYVRDYPAAHYAAEDEAELRLKLELEEPERIVPWSSVDPTRRRRRSRPRRRHPSRSTSRAEADPLHGARRRDALLAEHVVSPCEQSPGPNGLTIAVNYWYDMQFDIKYAYFNFLRSLEIDGSSSKKTDALEDDLEETND

SEQ ID NO: 257 - DNA, 570 bp, Oryza sativa
  misc_feature (370)..(370): m = adenine or cytosine
atggcggatcgcgaccgcgccgggcagtactaccagcagcagagagggcaggtgggggagacggtgaaggggatcctgccggagaaggcgccgtcggcgtcgcaggcgctgacggtggcgacgctgttcccgctgggtgggctgctgctcgtgctgtccgggctggcgctggcggcgtccgtggtggggctcgccgtcgccacgccggtgttcctgatcttcagcccggtgctcgtcccggccgcgctgctcatcggggctcgccgtcgccggcttcctcacctccggcgcgctgggcctcggcgggctgtcgtcgctcaccttcctcgccaaaacggcgcgccaggcgttccagcgcaagcccgaatamgtcgagcaagcgcggcgcaggatggcccaggccgccgcgcacgccggccacaagacggcgcaggccggccacgccatccagggcagggccgaccaggccggaaccggcgccggcgccggcggtggcgccggcaccaagacatcctcgtaagcacgcgccgcgcgcgcgagtggctcgcgtcgcgtacgggctgggtttag

SEQ ID NO: 258 - protein, 189 aa, Oryza sativa
  misc_feature (124)..(124): Xaa = any naturally occuring amino acid
MADRDRAGQYYQQQRGQVGETVKGILPEKAPSASQALTVATLFPLGGLLLVLSGLALAASVVGLAVATPVFLIFSPVLVPAALLIGARRRRLPHLRRAGPRRAVVAHLPRQNGAPGVPAQARIXRASAAQDGPGRRARRPQDGAGRPRHPGQGRPGRNRRRRRRWRRHQDILVSTRRAREWLASRTGWV

SEQ ID NO: 259 - DNA, 810 bp, Oryza sativa
  misc_feature (547)..(547): m = adenine or cytosine
atggctgatcagcacagaggagtgatcggcggcggcggctacggtgaccgtggtggccaggagcagcaggagaagcagcccttcatgatgacggctctgaagacggtgaccgcggcgacggccgggggctcgatgctggtgctgtccgggctgatcctggccggcaccgtcatcgcgctcacggtggccaccccggtgctggtcatcttcagccccgtgctggtgccggcggccatcgcgctggcgctcatggcggccgggttcgtcacctcgggcgggctcggcgttggccgcgctctccgtgttctcgtggatgtacaagtacctcaccgggaagcacccgccgggcgccgaccagctggaccacgccaaggcgaggctcgcgtccaaggcccgcgacatcaaggaggcggcgcagcacgcgcatcgaccaggcgcaggcgtcttagggcggcctgccgcggcgaggcgccgcttctgctagctagctcgatcgggcggcgcacgggacggcgccggccggcgcgcgtgcgttcgccgtggccamgcccacgctggctactcctcttatctgctgagctctgtaaatgcatgcgtacatgtttaattaagcttggtcgcgtagtactctcctatgtaatatgtcccctagattatctaagaggcgatcgtgcatgtcgggcgcctggtacgtgtggtctggtggatgtcgtgtttatggtcatgatgaataaaatgcagtgttccttcgataaatctagtggttgtactgtttttttttttaacgataagggcatgagttccgcatag

SEQ ID NO: 260 - protein, 269 aa, Oryza sativa
  misc_feature (183)..(183): Xaa = any naturally occuring amino acid
MADQHRGVIGGGGYGDRGGQEQQEKQPFMMTALKTVTAATAGGSMLVLSGLILAGTVIALTVATPVLVIFSPVLVPAAIALALMAAGFVTSGGLGVGRALRVLVDVQVPHREAPAGRRPAGPRQGEARVQGPRHQGGGAARASTRRRRLRAACRGEAPLLLASSIGRRTGRRRPARVRSPWPXPRWLLLLSAELCKCMRTCLIKLGRVVLSYVICPLDYLRGDRACRAPGTCGLVDVVFMVMMNKMQCSFDKSSGCTVFFFNDKGMSSA

SEQ ID NO: 261 - DNA, 957 bp, Oryza sativa
atgccgatctgcccgccgtcgtcggaatcctcgccggcgccggggttgggggggcgcgcgttgatcttccacgggttggccctcggcgcggcggcggcggctgcggcggccgcggcctacttgtacaggcggccgggcgggttccgcggccgcgcggtgggcatcataccggcgcgcttcgcctcctcccgcttcgaggggaagccgctcgcccccatcctcggcaagcccatgatacagcagagaacatgggaaagagttatgttagcctcctctttggaccatgttggtcgtggcaacggacgatgaaagaatagctgaatgttgtagaggattcggagctgatggatctgagcgttgctgtgaggctcttcaaaagctaaacaagcattatgatattgttgtcaatattcaaggagacgagcctcttattgaaccagagataatagatggtgtagttatggcactacaggttgttacttatttgcagcgagctcctgatgcagtctttagcacagctgtcactgcactgaaacctgaagatgcatctgatacaaatcgagtgaagtgtgttttagataaccagggttatgcaatatacttctcaagagggctgattccatttaataatcagggaaagtcaatcctcagtttccatatcttcttcatctgggcattgcggggctttgattccaagtttttgaagatctatccagagcttccaccaactccattacagctagaagaggatctcgagcaacttaaagttcttgaaaatggatacaggatgaagaggtaatcaaagttgatcatgatgcccatggtgtggatgcgcctgaagatgttgagaaaatagaagcattgatgcgtgcaaggaacatccagtagcatgaaaatgatcgattttgtacgttgtgtggttacatgtttgattcgactgttcgtgttctagtatag

SEQ ID NO: 262 - protein, 242 aa, Oryza sativa
  misc_feature (146)..(149): Xaa = any naturally occuring amino acid
  misc_feature (190)..(190): Xaa = any naturally occuring amino acid
MPICPPSSESSPAPGLGGRALIFHGLALGAAAAAAAAAAYLYRRPGGFRGRAVGIIPARFASSRFEGKPLAPILGKPMIQQRTWERVMLASSLDHVVVATDDERIAECCRGFGADGSERCCEALQKLNKHYDIVVNFKETSLLLNXXXXEIIDGVVMALQVVTYLQRAPDAVFSTAVTALKPEDASDTNXRVKCVLDNQGYAIYFSRGLIPFNNQGKSILSFHIFFIWALRGFDSKFLKIYP

SEQ ID NO: 263 - DNA, 321 bp, Oryza sativa
atggcgtccattgatcttcctcccccctccaactccaagaaatcgactgacgccaacgagaacgagacgccatcgctgccatgggtttgcagggaggagtttgaggagttcgccgagaaggccaagaccttgcctgacacaatttccaacgaggacaagctgcttctctatggcctctacaagcaggcaaccgttggcccggttaccactggggaaatccaaggaggaagctatggccgattacatcaccaaggtgaagcagctgctggaggaggcttctgcatccacttcttaggctattatgaacaacaccatcaatag

SEQ ID NO: 264 - protein, 97 aa, Oryza sativa
MASIDLPPPSNSKKSTDANENETPSLPWVCREEFEEFAEKAKTLPDTISNEDKLLLYGLYKQATVGPVTTGKSKEEAMADYITKVKQLLEEASASTS

SEQ ID NO: 265 - DNA, 1152 bp, Oryza sativa
atgatgaggctgaaagtgacgatactggtggtagcatttgttctcagcgccggcgtgcatatctcggcggcggcggcggccgccggccagagggaggaggtgcacctggtgccggcggtgtacgtgttcggcgactcgacggtggacgtcgggaacaaccagtacctgccggggaactcgccgctgcagctcccctacggcatcgacttcccgcactcgaggcccaccggaaggttcagcaatggctacaacgtcgccgacttcatcgcgaaactggtgggattcaagaggagcccgccggcttacctgtcgctgacgccgcagacgagccgtcagctcatgcgaggctaccgcggcgccaattacgcttctggaggatccggcattctcgataccactgggacaaccgtcgtcacgctgacaaagcaaatcgtgtacttcgcggccaccaagtcaaagatgatgtcgaacggcggcggcgatggcaacagctcgtcggcgtcggcgtcggcgatcgacgatctgctgtccaagtctctcttcctcatcagcgacggcggcaacgacctgttcgcgttcctgaggcagagcaaccggacggcgagccaggtgccgtccttctacgccgacctgctgtccaactacacgcggcacgtccaggcgctgtacagcctgggcgccaggcggttcggcatcatcgacgtgccgcccatcgggtgcgtgccgtcggtgcgggtcacctcgcaggcgggcgccaccaggtgcgtcgacgccgccaacgacctcgccagggggttcaactccgggctcaggtcggcgatggccaggctcgccggctccggtgctctcccggggatgaggtactccgtcggcagctcgtacaacgtggtgtcctacctcacggcgaacccggccgccgcggggttcaaggtggtgaacagcgcgtgctgcggcggcggccggctcaacgcgcaggtcgggtgcggggcgcccaactccacctactgcggcaaccgcaacgggtacctgttctgggacggggtgcacgggacgcaggccacctccaggaagggcgccgccgccatctactccgcgccgccgcagatgggcttcgcctcgcccattaacttcaagcagcttgtttcttcttga

SEQ ID NO: 266 - protein, 383 aa, Oryza sativa
MMRLKVTILVVAFVLSAGVHISAAAAAAGQREEVHLVPAVYVFGDSTVDVGNNQYLPGNSPLQLPYGIDFPHSRPTGRFSNGYNVADFIAKLVGFKRSPPAYLSLTPQTSRQLMRGYRGANYASGGSGILDTTGTTVVTLTKQIVYFAATKSKMMSNGGGDGNSSSASASAIDDLLSKSLFLISDGGNDLFAFLRQSNRTASQVPSFYADLLSNYTRHVQALYSLGARRFGIIDVPPIGCVPSVRVTSQAGATRCVDAANDLARGFNSGLRSAMARLAGSGALPGMRYSVGSSYNVVSYLTANPAAAGFKVVNSACCGGGRLNAQVGCGAPNSTYCGNRNGYLFWDGVHGTQATSRKGAAAIYSAPPQMGFASPINFKQLVSS

SEQ ID NO: 267 - DNA, 1163 bp, Oryza sativa
  misc_feature (257)..(257): k = guanine or thymine
atgtcccgcgccgtcgagccgccggcgccgaggccgtgcggcacggagggtggcccgccggtgaccgcgacgaggctgaggctgcgcgacggccgccacctcgcctactgcgagagcggcgtccccaaggaggaggcccgcttcaaggtcgtcttctcccacggcttcaccggctcccgcgaggacagcgtccgcgcctcccagcgcgccgtggtgccgccgccgccgccgccgcggatctgcgggtcgcccggtgkgccgcccgtggcggcgccccgggtgcggctgagggacgggaggcacctggcgtacgcggagtccggcgtgcggaaggaggacgcgcggtacaaggtcgtcttctcccacgggttcacgggctccggcctcgactccgtccgcccttgccggtcggaggtggctgaggagttgggcgtgtacatggtaggctttgatcgcgctggatatggtgagagtgatccaaaccccaatcggtctgtgaagagcgctgccctcgatgttgaggagcttgcggacgctctaggattaggccccaagttctatgtgatcggtatctccctcggctgccatgctgtttggggcgccctcaagtacatcccagaaagaggattgctggagcggccatgatggcaccggtggtgaactactggtggccggggttccctaccgatctggctgccgaggtgtacaacaagcaggaagtgggtgaccagtgggcgctgcgtgtttcacaccatgcacccagcatcctccactggtggatggagcagagctggcttcccacctccaccgtcgtggctggcaccactcccctccccaacaagcgtgatgccgagatccgcaaaaatatgaaggcggatggctcgttccagaaggcgacacaacaaggcattcatgagtcgtactaccgtgacatgatggtgatgttcggcaagtgggagtttgacccgatgagcttgccgaagccgccatgccctgtgcatatctggcagggcgacgaggacgggcttgtgccggtggtgttgcagagatacctcgttagccggctcagctgggcgaactaccatgagctccccggaaccgggcacttcctgtctgcggttcccgggcttggagacaccgttcttaggaccattttcggttga

SEQ ID NO: 268 - protein, 139 aa, Oryza sativa
  misc_feature (59)..(59): Xaa = any naturally occuring amino acid
  misc_feature (85)..(85): Xaa = any naturally occuring amino acid
GCATAATSPTARAASPRRRPASRSSSPTASPAPARTASALPARRGAAAAAAADLRVARXAARGGAPGAAEGREAAAAADLRVARXAARGGAPGAAEGREAPGVRGVRRAEGGRAVQGRLLPRVHGLRPRLRPPLPVGGG

SEQ ID NO: 269 - DNA, 3068 bp, Oryza sativa
atgccgcaggagccggagggggaggcggcggctgcgggggcggggtcgttcctccggcttcccgagtcggcgggggcgttcgacgagctgccgcgggcgaggatcgtcggggtgtcgcggcccgacgccggggacatcacgcccatgctgctctcctacaccgtcgaggtccagtacaagcagcagtttaggtggcttctatataagaaggcatcacaggttctatatctacattttgcgttgaaaaggcgtgcatttcttgaggaattccatgagaaacaggaacaggtcaaggaatggcttcaaaatttgggaattggggagcatattccagttgtgcatgatgatgatgaagcggatgacgtgcatgttccttcacaacatgatgaacactctgtcaaaaatagagaaatgttccctctagtgctgtcttgcctgtcattcgtccagcccttggtcgtcagcaatctgtttctgatcgtgcaaaggttgccatgcaagaatatctgaaccatttcttgggaaacatggaaattgtcaactcaagagaggtttgtaaatttttggaagtctctctgttatcatttctaccagaatatgggcctaagctaaaggaagattatgttacagttggacacttaccaaaaattgacgaaggtagcagtaacatatgttgtttgtgtggatgttttagtttctgcaacagtagctggcagaaggtttgggctgtactgaagccaggatttttagctttgctccaagatccatttgatccaaagcttttggatatagttatctttgatgtatcacctcacatggatagaaatggagaaggccaaagcactctagcaagagagattaaggaacataatccattgcactttgcatttgagaaggtgtcttctggggggcggacaataaaattgagaacaagaagttctgctaaagtgaaagattgggtatctgcaataaatactgctcgacgacccccagagggttggtctcacccacaccgttttggttcattcgcaccacctaggggtttgactgaagatggtagcgtcgtacaatggtttcttgatgggcaagctgcgtttaatgctattgcttcttcaattgaggaagccaaatcggagatattcattactgattggtggctgtgcccagaactgtaccttcgacgccctttccaccatcatgaatcctctagacttgatattcttctagaatcaagggcaaagcaaggtgtacagcagatctatattcttttgtacaaggaagtttctcttgcattgaaaattaacagcatgtacagcaaacagaggcttttaaacattcatgagaatgttaaagttctgcgataccctgatcatttctcaactggcatatacttatggtacgtcacatcatgagaaaatcgttattgttgataatcaagtatgctatattggaggccttgatttatgctttggtcgttatgatactcctgagcataaagttgtggatgttcctccttcaatatggccaggaaaagattactacaatcctaggaatctgagccaaattcttgggaggacaccatgaaagatgagcttgatcgtactaaatatcctcgcatgccctggcatgatgttcagtgtgctctttatggtcctgcatgccgagacatagcaaggcattttgttcagcgctggaactatgcaaagaggaacaaagcaccaaatgagcaagcaattcccttattgatgcctcaacatcacatggtaattccccattacatgggtaaaatcaaagaatcaaatgaggaagtaagtaaacagactcatgttgaggatattaaaggccagaagttaagctccttgaaagcaccagcatcatgccaggacattccattgcttttgcctcatgagcctgatcaccaggcatcaaataatggagagttaggataacgaatggtgggagacacaggagcgaggagaccaggtcgattatgtgcttgatattggagaacgaagtgttggtccgtggtcagcaggaacaactcaaattgaagggagcatccacaatgcctatttttctctcatcgaaaaagcagaacattttgtgtacattgaggtgctgaaccttttttaatctcttgattttcaaataatcagtttttcatatcaggtctttcaggagatgacacaataaaaaaccgtgtattagaagcattatacaggcgtatacttagagcagaaaaggagaaaaggtgcttccgggttataattgtcataccgcttttacctggatttcagcagggaggcattgatgacggtggagcagcatctgttagagcaattatgcactggcaatacaggaccatttgtagagggcctaattcaatacttaagaatctttatgatgtggttggttccaaagcccatgattatatctccttttatgggctcagggcacacggcagactagcagatatatgtgcacagtaagttgatgatcattgatgaccggatgacactgattggatcagctaacataaatgacagaagtttgcttggatcaagggattctgagattggtatgattattgaagataaagaggttgtcagttcaattatggatggaagacattgggaagcagggaagttctctcttagcctacgactttctctatgggcagaacaccttggccttcatccaggagagcaaattatggatcctgtggacgatttgacttataacaacatctggatgggcactgctaagaacaccaagatataccaaaatgtcttctcgtgtgttcccaatgatcacatccattctagtttaggcaaggatttgctcaccggaaggagaaaatcggccacacaaccattgacctgggtgttgctgtagagataacagaaactcacaaggatggggatctggcaggcaccgatcctatggaaaaattacaggccgttaggggccatctcgtttccttccctttggagttcatgtgccaagaggacttgagaccattcttcggcgaaagcgaatattatacgtccccgcaagttttccattag

SEQ ID NO: 270 - protein, 1022 aa, Oryza sativa
  misc_feature (1)..(1022): Xaa = any naturally occuring amino acid
MPQEPEGEAAAAGAGSFLRLPESAGAFDELPRARIVGVSRPDAGDITPMLLSYTVEVQYKQQFRWLLYKKASQVLYLHFALKRRAFLEEFHEKQEQVKEWLQNLGIGEHIPVVHDDDEADDVHVPSQHDEHSVKNREMFPLVLSCLSFVQPLVVSNLFLIVQRLPCKNIXTISWETWKLSTQERFVNFWKSLCYHFYQNMGLSXRKIMLQLDTYQKLTKVAVTYVVCVDVLVSATVAGRRFGLYXSQDFXLCSKIHLIQSFWIXLSLMYHLTWIEMEKAKALXQERLRNIIHCTLHLRRCLLGGGQXNXEQEVLLKXKIGYLQXILLDDPQRVGLTHTVLVHSHHLGVXLKMVASYNGFLMGKLRLMLLLLQLRKPNRRYSLLIGGCAQNCTFDALSTIMNPLDLIFFXNQGQSKVYSRSIFFCTRKFLLHXKLTACTANRGFXTFMRMLKFCDTLIISQLAYTYGTSHHEKIVIVDNQVCYIGGLDLCFGRYDTPEHKVVDVPPSIWPGKDYYNPRNLSQILGRTPXKMSLIVLNILACPGMMFSVLFMVLHAETXQGILFSAGTMQRGTKHQMSKQFPYXCLNITWXFPITWVKSKNQMRKXVNRLMLRILKARSXAPXKHQHHARTFHCFCLMSLITRHQIMESXDNEWWETQERGDQVDYVLDIGERSVGPWSAGTTQIEGSIHNAYFSLIEKAEHFVYIEVLNLFXSLDFQIISFSYQVFQEMTQXKTVYXKHYTGVYLEQKRRKGASGLXLSYRFYLDFSREALMTVEQHLLEQLCTGNTGPFVEGLIQYLRIFMMWLVPKPMIISPFMGSGHTADXQIYVHSKLMIIDDRMTLIGSANINDRSLLGSRDSEIGMIIEDKEVVSSIMDGRHWEAGKFSLSLRLSLWAEHLGLHPGEQIMDPVDDLTYNNIWMGTAKNTKIYQNVFSCVPNDHIHSSLGKDLLTGRRKSATQPLTWVLLXRXQKLTRMGIWQAPILWKNYRPLGAISFPSLWSSCAKRTXDHSSAKANIIRPRKFSI

SEQ ID NO: 271 - DNA, 810 bp, Oryza sativa; identical to SEQ ID NO: 259
  misc_feature (547)..(547): m = adenine or cytosine

SEQ ID NO: 272 - protein, 269 aa, Oryza sativa; identical to SEQ ID NO: 260
  misc_feature (183)..(183): Xaa = any naturally occuring amino acid

SEQ ID NO: 273 - DNA, 1617 bp, Oryza sativa
  misc_feature (9)..(9): m = adenine or cytosine
  misc_feature (1019)..(1019): r = adenine or guanine
  misc_feature (1025)..(1025): k = guanine or thymine
  misc_feature (1027)..(1027): r = adenine or guanine
  misc_feature (1033)..(1033): w = adenine or thymine
  misc_feature (1039)..(1039): k = guanine or thymine
  misc_feature (1042)..(1042): k = guanine or thymine
  misc_feature (1044)..(1044): k = guanine or thymine
  misc_feature (1046)..(1046): m = adenine or cytosine
  misc_feature (1049)..(1049): k = guanine or thymine
  misc_feature (1050)..(1050): r = adenine or guanine
  misc_feature (1095)..(1095): s = guanine or cytosine
  misc_feature (1210)..(1210): w = adenine or thymine
  misc_feature (1215)..(1215): m = adenine or cytosine
  misc_feature (1222)..(1222): y = cytosine or thymine
  misc_feature (1238)..(1238): w = adenine or thymine
  misc_feature (1446)..(1446): y = cytosine or thymine
atggcctamgcgctgcgcggtgccgccctcgtcggcgtcctcctcctcgtcgtggcctccccggcgctcgtcccggtggcctccgccgtgcccttcatcgtcctgcacgagggatcggcgaccagtgcgagaacggtgggatggcgtccttcaccgaaatgcttggggaatggtccggctccaagggatactgcatattaaatgtattcctcctcagtgaaattggaagaggagcatgggactcttggctgatgccacttcaagagcagcaggcagacactgtttgcaagaagcaggtgaagaaaatgaaagaactccgtaaaggttacagcatagttggcctttctcagaccttttacaggggaacttaattggtcgggcagtaattgagtactgcgatggtggaccaccggtagggtaaagaatttcatctcgattggtggtcctcatgctggtacggcatcagtaccactttgcggttctggcatcgtttgtgttcttattgatgctctgattaaattggagatatattcaaactatgtacagcaggcacaccttgctcctagtggttacctaaagatacccactgatatgacagattatttgaagggttgcaagtttcttccaaagcttaacaatgagataccaagtgaaagaaatgctacgtataaacaaagattcagcagcctggaaaatctagtattgattatggtaagatgaacacgtttgaggacgacgcagtgttaataccccgggaaacggcatggttcgggtactatcccgatggcgccttcagtccagtgcagccacctcaaaagagacaaagttgtacacggaggactggatcggcttgaaggctttggaggaggctgggcgtgttaagttcgtatcagtgccaggagcgagaagaaggcgttccgagtgaccagttctaacgtcacatggacatggattgtatgtaagctctgaattgtggacttaattgttgatgccatgtaaataccttggtaaaggtaatrgagagkartggaawaactgkcgkgkamtgkrgggcaggtaggtctagcgtacctgaactgcagaactgagcgatgsctcagaattgtggctgcctattagcaaaacgcaattgtggcgcttttatgtagcagaccatcactaggaaaaagtccaattcgacaatctcgtatatagttcaggattaaattcwacaamagaggcytcctccaatggtgccwtgtaagctatctcataacatgtccacatcatcatgtatcctatgtggaggaaagagaagacaaaaaatcaatccatctatctcctattcccacgcctatctcgctcagttaccgatgccgtatgagcctgcgcaagagacagcagtcgactcttccacgccaaaatcagatcccgtgctcccttcccccaaatcgccccggccgcacytcccgcccacccccgcacgctgcaccccgttcccgcacgatcccgcgcgctgcaattcgctcccccaccccctggcgcgccaatttgctctcccccgcgcaaatcctccagccacccgcgcgccaatccttcccttgcaccctccctcctcttttcttctccagtgtgtga

SEQ ID NO: 274 - protein, 538 aa, Oryza sativa
  misc_feature (3)..(3): Xaa = any naturally occuring amino acid
  misc_feature (340)..(340): Xaa = any naturally occuring amino acid
  misc_feature (342)..(343): Xaa = any naturally occuring amino acid
  misc_feature (345)..(345): Xaa = any naturally occuring amino acid
  misc_feature (347)..(350): Xaa = any naturally occuring amino acid
  misc_feature (365)..(365): Xaa = any naturally occuring amino acid
  misc_feature (404)..(405): Xaa = any naturally occuring amino acid
  misc_feature (408)..(408): Xaa = any naturally occuring amino acid
  misc_feature (413)..(413): Xaa = any naturally occuring amino acid
MAXALRGAALVGVLLLVVASPALVPVASAVPFIVLHEGSATSARTVGWRPSPKCLGNGPAPRDTAYXMYSSSVKLEEEHGTLGXCHFKSSRQTLFARSRXRKXKNSVKVTAXLAFLRPFTGELNWSGSNXVLRWWTTGRVKNFISIGGPHAGTASVPLCGSGIVCVLIDALIKLEIYSNYVQQAHLAPSGYLKIPTDMTDYLKGCKFLPKLNNEIPSERNATYKQRFSSLENLVLIMVRXTRLRTTQCXYPGKRHGSGTIPMAPSVQCSHLKRDKVVHGGLDRLEGFGGGWACXVRISARSEKKAFRVTSSNVTWTWIVCKLXIVDLIVDAMXIPWXRXXRXXEXLXXXXGQVGLAYLNCRTERXLRIVAAYXQNAIVALLCSRPSLGKSPIRQSRIXFRIKFXXRGXLQWCXVSYLITCPHHHVSYVEEREDKKSIHLSPIPTPISLSYRCRMSLRKRQQSTLPRQNQIPCSLPPNRPGRTSRPPPHAAPRSRTIPRAAIRSPTPWRANLLSPAQILQPPARQSFPCTLPPLFFSSV

SEQ ID NO: 275 - DNA, 939 bp, Oryza sativa
atgcgcctcgccggcggcttcgtcttcctcctctgcgtgcacctgttcttgattcctcccgatggggctctctcggcccccggcggcggcggcgagcggtgcaggcggcagtgcggcgggttggttgtcccctaccctctgggattctccggcagctgccccatcctgctggcctgcgtcgacgccggcaactccacggccgcgttgatcctccctggcggcggcggcggcggcaacgccacgacgacgacctcgtcgtactcgtataccgccagcaacttcaacgccagcaggtcgacgttcgtcgtcgccctcccgccgtcctgcagccgcaccgtctccgaggcgaggcggtggctctctggcgccaactacggcgtgtcgtcgcgcaccggcctgttcctccgcggcgactgccatagaaacagcagcgcctcgaacgccaccaactgcagcatccccgccgaaaccatgtccaggatggtccccacggcgagctgcggcgccgaaggcaacacaaccgcgtcggcgctgacttgcgtcacgtcgacctcgccggcgccggacccagcaaagccagagtcgtcgtcggggtcggggatagtaggcctgttcgcggagtggaagaagctcgaggaacctagctgcgacaacctgctgacgtccgtgtacggtgacacacgggagggggtgttctctctggagttctcggtggcggagatggggtggtgggtcaacgggaactgcacccacggcggcggcggcggcgacctcgcctggcggtgcgcgccgaacgcgacgtgcctcaacgtgcagacaccgaccggcgggtgggggcatcagtgcaagtgcctgcacgggatggtcggcgacgggttcgccgccggcgagggatgctactttgccggtgagtcctctcctgatatatctcctctctaa

SEQ ID NO: 276 - protein, 312 aa, Oryza sativa
MRLAGGFVFLLCVHLFLIPPDGALSAPGGGGERCRRQCGGLVVPYPLGFSGSCPILLACVDAGNSTAALILPGGGGGGNATTTTSSYSYTASNFNASRSTFVVALPPSCSRTVSEARRWLSGANYGVSSRTGLFLRGDCHRNSSASNATNCSIPAETMSRMVPTASCGAEGNTTASALTCVTSTSPAPDPAKPESSSGSGIVGLFAEWKKLEEPSCDNLLTSVYGDTREGVFSLEFSVAEMGWWVNGNCTHGGGGGDLAWRCAPNATCLNVQTPTGGWGHQCKCLHGMVGDGFAAGEGCYFAGESSPDISPL

SEQ ID NO: 277 - DNA, 8484 bp, Oryza sativa
  misc_feature (4092)..(4092): y = cytosine or thymine
  misc_feature (4463)..(4463): m = adenine or cytosine
atgctgcccaagggcgcagacgaggagataccactcatcaagcaagatcttgaggaaataatctcaatcctccatggtcacagtgagccaaaactggaggaccatagcatggtggtcaggtgctggatgaaggaggtgcgtgagctctcttacgacatcgaggacagtattgaccagtacgagcatgccgccaggtctcagaatagacctaatattcaccaccgtaagttcaatcggtggcgtggaaacaagatcccatgtattccccagaaactgaaacaacggttgtggatggccaacaagatcagagaattcagcctgcgcatccaggatgcgcttcaacgccatgccatgtacaacaacctcggtggtgtcgctggtactgcttctactactagaggagatgtatgctctgccacaccttggcatcccacaaagacgcagttcagagagcatgtcgacaacgtccgttctgtcagtatagatgtcgatggtatggaagctgccctgaatgacttgaacaagctcaaaaacttgcttgctggcatcccgactgcttctctcgtgcagttcagggagcatgccgacaaagtccgtggtatccacaccgatatagaagccatcctgaacaagctcgaaaacataccccctggcatcaccaccactactactactactactagagaggagaagctcaaggtggtgtccatcgtgggagttggaggagttggcaagactacgcttgccaacaagctgtaccgcaagcttcggtggcagttcgagtgccgggcatttgtgcggacatcccagaagactgatatgaggaggcttctcatcaatatcctcttacagattcggtcgcaccaatcacctgacaattggaaggtgcatagcctgatttccagtatcaggacatatctgcaagataagagggggtgtgtctgttgcttgctatccctgatatcagccttagccacaattaggcctcatttggcaaaagatatcccacccatcaaagggttcttgatcgtaattgatgatctatgggctacatccacatgggatattattaagtgcgctttgccggagggtaacaagtctagcagaatactgaccacaacagaaattgaagatctagctttgcaatcttgtagttatgacttgaaatttattttcaagatgataccttttggtgaggatgactcaagaaaactattattcagtatagtctttggctctcattctaagtgtcctccagaagtcagtgaaacattatatgatattgtaaggaaatgtggtggcttgccgctagctattgtcactgttgcaagtcttttagcaagccagcttgataaactggaacaatgggattatataaacaaatccttaggttacagtttgatggcaaatcctactttggaagggatgaaacaactactgaacctttgttacaacaatcttcctcagcatttgaaggcatgcatgttgtatcttagtatgtatcaaggagatcacataatttggaaggatgatttagtgaatcaatggatagctgaaggttttatctgtgcaactgaagagcatgacaaggaagaaatttcaaggggctattttgatgagcttgttggtagaaaaatcatccagcctgtccatatcgatgacagcggtgaggttttgtcctgtgtagttcaccatattgtactcaattttgttacatacaagtcaatagaagagaattttattattgcaatagaccattcacaggcaactataagatttgctgacaaggttcgacgattatctattcacttcaataatgtagaagatgcacctccacctactaatatgagattgttccaagttcggacaattgccttctttggggtcttgaagtatatgcctttcattatggagtttcgacttattaaagttttatttctacattttttgggtgatgaggatagcaccggcattgttgatctcactaaaatttcagaacttgtccgactgagatatttgaaggtcacctctaatgccaccgtaaaactgccaacccggttgcaaggtctaccatatttggagacactgaaaatagatggaaaaataagtgaagttccaacagacatttatttgccaggtttgctgcatcttactcttcctgctaagacaaacctgcccagtggaattgtccacatgacatcgcttcgtacaattgaatattttgatctcagctgtaactcagcggagaatctatggagccttggtgagctgagcaatctccgggatttgcagctcacctattctgaaatacattctgacaatctgaaggataatatgaaatatcttggatccattctggggaaactccgtaatctcacatctataactttatcgcctcctggctcttcctgtccagatactctacatattgacagggatacaaagacgaggatcaatgttgatggctggagcagtgtgtcctctccaccagcccttcttcagaggtttgagttgttaccatgtgtttgcatcttttctaacctcccaaattggattgggcagcttggaaacctctgcattttgaagattgggataagggaagtaacaagtaataatattgatgttctcggagtattaccagagctcactgttttgtcactttatgtccacacaaagcctgcagaaaggattgtctttgacaatgcagggttctcaatcctcagatacttcaagtttatatgcagtgtagcatggatgaaatttgaggttggtgcaatgcctagtctaaggaagctcaagttaggttttgatgtccatagagcagatcagcatgatattattcctgttggcatcgaacatctgtctggacttgaagagatctctgccaaaattagggtcgcttctactgctcatgatcattgtagaagatttgcagagtcagctttgactaacgctattaggatgcatccaggacgtcctagcgtcaacatccgatgtgtagattggacctttgatggtatggatgttagcaatgccgggacacgggagggagaatgcaggattctgaaaaaacaacaaaatatcgtgaaagaaagctctactgagaagtctgcagttctagaaaaggatcgtggggatggagcaaataaatctgatgaaagcaggtggccttcgtcagttgatccaaggacagtgacagccaaatccgacacttttttggtcgcctgcgttcccttggctgcatgcaatgaagcaggttgcaaggggatgagattggcgggacgacaagctgcatttatggtggcatgtgggcatgatagtgggcaaggcctgctagatctagcctttccttgctcagactcactggtggcggatggctacagctacgcgaattgctacgttgttagggactgtttggtggagcttttagcaactggagattctagggagaagctacctatggaaatgtggcatgtgaggagtaatacggaggatgacggcctcagctggagtaagtacgagcagaaggagatcctcggcgccaagttcccaagagcttatttccggtgcacacactggaacacgaagaagggatgcatggcgaccaaggaggtgcagcgcgacgacggtgaccccctcatgttcgacatcgtataccacggtgagcacacttgcactcagaccgcggagtccaatgtcgacgaacagatcagattaacgcgaacgcgagacaagaaggtaaagagaacgaagaggaaaaggcaagtgagggtgacctccgtgccggcggatgacggctacagctggaggaagtacgggcagaagaacgtcctcggcttcagttacctaaggggttactacaggtgtgccaccaagggctgccaggcgtccaagcaagtgcagcgccacgacgacggcttgctcttcgacgtcacatactttggtgagcacacctgcgctgatcagcctcaggcagcgcactccagcgaccaagtacaggtcacattatggccgcctgccagcacgatcctggagcggccgacattcaagacgcgtttgcaaggtcaagtggacgccatggagaagcagcaygaaggcttcaggaagatgctgtccagtattcaggaggcgatcggcgccatgtcggtgaagcaaggcgaggtgcaggagacgatgaacaaaatggagaaatccatttcaagttggcgacctcaggttgatgctgcggtgcagagcttgcagcgcgacatggagttgcagagaaatcaagtcggtgcggtggagcgacatcaagcggaagctgacaaatcgtcgaacacctcgcaggcgttggaggagcgggaggaaattgctcgtcgcacatctcagttgccgacgtcgccaaccatgtctctgccagtatcgcaggcgttggaggagcgggaggaaattgctcgtcgcgcacctctgttgccgacgccgcmaaccgcgtctatgccagcctcgactggcgaaattggtctggatggccaccgcatttcaactcagttccgggggagggcatcgggggtagtcactactctcgtcccacctccgggcaagggtacgcactctctaccattttctcctcgtgttcatccaaatttttcggagtttgttggtcgcgaggagagtgggggatcagtggggcgtgggtacaatcacagattgccgaaattggattttccccaatttgatggcagtgatcctcagaattggcgtttaagatgtgaacattattttggggtttatggcactcatccagatttatggctgcatcttggttacgttcttcgcgagctcatttgctttgtggggaattggggagttttttgtgatacggtggataggaagtttgataggaatagacaccttcagcttgttcgtcagattgatcaactcaagcagtcagggtcggtgaatgagtattatgagcgttttgatgatttgtggagtcagttgttagtttatgatccaaccttgagcactgaggaattgggagaggctggtggatctttggtgtccaaggatgggaagaaattgggtgatcacgctgctcgaattaaaagtgcttaccctttacctttaccaccacccaaatttgtgcatgctggcaagggagatgataaaagaacagctgaagttcctaaagtggccaattcttctgataaattggttgctctcaaggcctatcgacgagctcaaggtctttgctatgtttgtgctgaaaaatggtctcctactcacaagtgttcaggatcagtacagttacatgctgttcaagaactcttcagtgttttggcagctgatgtttctgagggtgaacaggatgctgattctatctctagtttgatggctatttctttacaggccattcaaggcacggtttctgcacatactttgcgattacaagggtccattcaaggctttgatgtgttaattttggtggattcaggcagctcttgcagttttctcagttcagtggttttacctcatctcactggtgtgaaatctttacttactccagttcaagtaaaggtagccaatggtgctgttctttcttgtacctctgagttgccggctgcaaaatgggaggttcaagggcatcagttctctactgatttcaaactgcttcctttggacaattatgatatgatcttgggtatggactggttagagaaatatagtccaatggatatcaattggcaggccaaaacaattcagtttggtcttcttgataagtcagtggaacttaaaggagtggtaccggaattggataaatgtgatctggtctctattcatcagttacagctgttgcacaatcaaggagctgtggagtccttggttcagctcactgccagtgacggctctagttcttctcaaaatgttccaagttcaattcagtccattttggatgaatttgctgacatttttaatgaaccagacgggttgccaccttctcgatcttatgatcacactattcctagctggttgaggtcgcgaaggttgacgctgttccacgaccacccggtcctgggggccgggaggtaccgcccgttcgcggcgctgtggagcatgaggatgtcgccgccgtcgaggtggagtatgtgcaccgtccacgccgcgcggtcctggtgcaggtccgcagccacacgtggtgcccgtcgtggaacttctccattgcctccggcgagcggcggaggcggcgcgggtctcttgctttcttggcgctcccgtcggcgagaagaagagacggcgcggcgaggggagagcggagggaggggagcagttcgctgcgctcttggtttcttgcgccgcggcggaggcggcgttggccaatggcctcggcagccaacctgcgggcgtcggtgccggaggccgtggcagccagtcgacgatgaagaggcgcccgccgccagccgccaggcgtcctccagagcatctaggccgctattggcgttcagcttcggcggcgcacggacgcagaatccttcctcctgctcggaggaaggccatggcgacgggcggtggtggtggatgctggcgctggcggtgggcgcgagctcgacgcgcctcctcggcgtcaagcggggccttcatgcaacgacggagacccattggttggttgttggtgttgctggcgcgggacgtgttctggcccatctcgtagcagcccaaacgtgttcaaccaacgcagcaagtttcaggatactcgacagggcacgcaagattaacggacggaattcgcttagtatcgatatggcttgtgcgagcgcgggaaaacgtgatatgatgaatcagccgggacatggtggtgatctgcccgtggccaagcggcggcggtgcgtcgaacccaccggcgccgccgcagcctgcatcccggaagacgtcatcgagcaaatcctcctccgtctccccgtcaagtccatcctgcggttcaggtccgtgtgcaagtcgtggcgctccatggtcgccgagccgcacttcgttcgcctccagctgcaccactccaccacggcggcgcgccgcgtactgtcaggctggcgtatcctacaggaacggatgggatcgatatgcttctttcgctacccggggcatggcgccctcgcggacctcgcgtatgagatgacatgctcctcggccgtcgccaccgccgacgaggatgataccgccgactgggacgccgtcgacgatggggatgccgtggatgacggggacgacgccgcggactgggacaccgacgatgacggggacgacgctacggactgggacaccgacgatgacggggacgacgctactacggattgggacaccgacgatgacggggacggcgccgaccggtacatcaacaatggcgccatcagtttgcaacccggcaacgagggattcgccgagctaccggcctgtacgccggactacttgaggatccaaagagtaggcttctacgccgaccagcctacaggcaagacgaaggtggttcgctacttcatccgccactgcaacgaaacctacacggactacagcgtcggatgcgaggttttgtccctcggctcgccggcgtggaggccgctcgccgaccctccctacctcgtcctgaacaaaacgtcaccgtgcatcctcggtggcatctactggatcgccatcctaccgtcgccgcccaccggcagctgcaccacccccggaaaaatgctacgcttcgacgtgtgcagcgaggagtttaccagtttcccgagcccaccgttcatggagcggcaggagatatgtgacgttaatgggaccctgacggagctggccggaaagctgtgctatatgcacactcccgccgacggtaaagttgagctctggacagcttccgccgccgacgaagggccgcgatggtcgctgcattgcaccgtcgtgctatcgtacccctttcaaaccatctacccatttgaccacgattaccaaggaagcatatttttcaacgtggattgtgccttgatttaccggtacgatgtggaacgcggagttgcggaacgcgtggtggacatgatcgacgacatgacctacatcaaccgttccaagctgtaccgtggtccaggttacttgaagtaccgtaccattcagtacagtgagagcctggaaagggtggtcggcctggcagaggaagaaggtgggaaggagagcgatgggccagaggaggaagaaggttggaaggggagcgatataggccggaggggaaagcgagcgcggcagccacagacagagcggcgtgtcggggttatcctccgtggaggcgacgagcacggccgcagcagcgacggcaggttcccggaactcggagccagcacgttcagccggagcaacggttgctacaccgacgccgcattctccgccgcgcgctcctcgtcgccgccgggctcaccgttcagcttctccttgattgctctcgtcaataaaaatgtgggcatcattattgatagctag

SEQ ID NO: 278 - protein, 2827 aa, Oryza sativa
  misc_feature (1488)..(1488): Xaa = any naturally occuring amino acid
MLPKGADEEIPLIKQDLEEIISILHGHSEPKLEDHSMVVRCWMKEVRELSYDIEDSIDQYEHAARSQNRPNIHHRKFNRWRGNKIPCIPQKLKQRLWMANKIREFSLRIQDALQRHAMYNNLGGVAGTASTTRGDVCSATPWHPTKTQFREHVDNVRSVSIDVDGMEAALNDLNKLKNLLAGIPTASLVQFREHADKVRGIHTDIEAILNKLENIPPGITTTTTTTTREEKLKVVSIVGVGGVGKTTLANKLYRKLRWQFECRAFVRTSQKTDMRRLLINILLQIRSHQSPDNWKVHSLISSIRTYLQDKRGCVCCLLSLISALATIRPHLAKDIPPIKGFLIVIDDLWATSTWDIIKCALPEGNKSSRILTTTEIEDLALQSCSYDLKFIFKMIPFGEDDSRKLLFSIVFGSHSKCPPEVSETLYDIVRKCGGLPLAIVTVASLLASQLDKLEQWDYINKSLGYSLMANPTLEGMKQLLNLCYNNLPQHLKACMLYLSMYQGDHIIWKDDLVNQWIAEGFICATEEHDKEEISRGYFDELVGRKIIQPVHIDDSGEVLSCVVHHIVLNFVTYKSIEENFIIAIDHSQATIRFADKVRRLSIHFNNVEDAPPPTNMRLFQVRTIAFFGVLKYMPFIMEFRLIKVLFLHFLGDEDSTGIVDLTKISELVRLRYLKVTSNATVKLPTRLQGLPYLETLKIDGKISEVPTDIYLPGLLHLTLPAKTNLPSGIVHMTSLRTIEYFDLSCNSAENLWSLGELSNLRDLQLTYSEIHSDNLKDNMKYLGSILGKLRNLTSITLSPPGSSCPDTLHIDRDTKTRINVDGWSSVSSPPALLQRFELLPCVCIFSNLPNWIGQLGNLCILKIGIREVTSNNIDVLGVLPELTVLSLYVHTKPAERIVFDNAGFSILRYFKFICSVAWMKFEVGAMPSLRKLKLGFDVHRADQHDIIPVGIEHLSGLEEISAKIRVASTAHDHCRRFAESALTNAIRMHPGRPSVNIRCVDWTFDGMDVSNAGTREGECRILKKQQNIVKESSTEKSAVLEKDRGDGANKSDESRWPSSVDPRTVTAKSDTFLVACVPLAACNEAGCKGMRLAGRQAAFMVACGHDSGQGLLDLAFPCSDSLVADGYSYANCYVVRDCLVELLATGDSREKLPMEMWHVRSNTEDDGLSWSKYEQKEILGAKFPRAYFRCTHWNTKKGCMATKEVQRDDGDPLMFDIVYHGEHTCTQTAESNVDEQIRLTRTRDKKVKRTKRKRQVRVTSVPADDGYSWRKYGQKNVLGFSYLRGYYRCATKGCQASKQVQRHDDGLLFDVTYFGEHTCADQPQAAHSSDQVQVTLWPPASTILERPTFKTRLQGQVDAMEKQHEGFRKMLSSIQEAIGAMSVKQGEVQETMNKMEKSISSWRPQVDAAVQSLQRDMELQRNQVGAVERHQAEADKSSNTSQALEEREEIARRTSQLPTSPTMSLPVSQALEEREEIARRAPLLPTPXTASMPASTGEIGLDGHRISTQFRGRASGVVTTLVPPPGKGTHSLPFSPRVHPNFSEFVGREESGGSVGRGYNHRLPKLDFPQFDGSDPQNWRLRCEHYFGVYGTHPDLWLHLGYVLRELICFVGNWGVFCDTVDRKFDRNRHLQLVRQIDQLKQSGSVNEYYERFDDLWSQLLVYDPTLSTEELGEAGGSLVSKDGKKLGDHAARIKSAYPLPLPPPKFVHAGKGDDKRTAEVPKVANSSDKLVALKAYRRAQGLCYVCAEKWSPTHKCSGSVQLHAVQELFSVLAADVSEGEQDADSISSLMAISLQAIQGTVSAHTLRLQGSIQGFDVLILVDSGSSCSFLSSVVLPHLTGVKSLLTPVQVKVANGAVLSCTSELPAAKWEVQGHQFSTDFKLLPLDNYDMILGMDWLEKYSPMDINWQAKTIQFGLLDKSVELKGVVPELDKCDLVSIHQLQLLHNQGAVESLVQLTASDGSSSSQNVPSSIQSILDEFADIFNEPDGLPPSRSYDHTIPSWLRSRRLTLFHDHPVLGAGRYRPFAALWSMRMSPPSRWSMCTVHAARSWCRSAATRGARRGTSPLPPASGGGGAGLLLSWRSRRREEETARRGESGGRGAVRCALGFLRRGGGGVGQWPRQPTCGRRCRRPWQPVDDEEAPAASRQASSRASRPLLAFSFGGARTQNPSSCSEEGHGDGRWWWMLALAVGASSTRLLGVKRGLHATTETHWLVVGVAGAGRVLAHLVAAQTCSTNAASFRILDRARKINGRNSLSIDMACASAGKRDMMNQPGHGGDLPVAKRRRCVEPTGAAAACIPEDVIEQILLRLPVKSILRFRSVCKSWRSMVAEPHFVRLQLHHSTTAARRVLSGWRILQERMGSICFFRYPGHGALADLAYEMTCSSAVATADEDDTADWDAVDDGDAVDDGDDAADWDTDDDGDDATDWDTDDDGDDATTDWDTDDDGDGADRYINNGAISLQPGNEGFAELPACTPDYLRIQRVGFYADQPTGKTKVVRYFIRHCNETYTDYSVGCEVLSLGSPAWRPLADPPYLVLNKTSPCILGGIYWIAILPSPPTGSCTTPGKMLRFDVCSEEFTSFPSPPFMERQEICDVNGTLTELAGKLCYMHTPADGKVELWTASAADEGPRWSLHCTVVLSYPFQTIYPFDHDYQGSIFFNVDCALIYRYDVERGVAERVVDMIDDMTYINRSKLYRGPGYLKYRTIQYSESLERVVGLAEEEGGKESDGPEEEEGWKGSDIGRRGKRARQPQTERRVGVILRGGDEHGRSSDGRFPELGASTFSRSNGCYTDAAFSAARSSSPPGSPFSFSLIALVNKNVGIIIDS

SEQ ID NO: 279 - DNA, 2163 bp, Oryza sativa
  misc_feature (222)..(222): m = adenine or cytosine
  misc_feature (228)..(228): y = cytosine or thymine
  misc_feature (265)..(265): k = guanine or thymine
  misc_feature (267)..(267): y = cytosine or thymine
  misc_feature (282)..(282): s = guanine or cytosine
  misc_feature (348)..(348): r = adenine or guanine
atgaacccgctccctcccccggccagccggctgtgggaggcgagcatccgcaagctcaagtactccaccatcctccgcggctccgtcgtcccctccggcgccgccttcgatggtgcggcggcggcggccaccggaggtgaccccgtcacgctcaccccaagcctctccgtcagctcctccacctccaacaccatctaccagtacgaagacggcgacgacgamatcgaytccgtcctcgacgacgtcgacaccgacgacgacgacktygacgaggcgtccctsggcgagcccagccattccgaccagctgctgcccagcggagacttctaccagggcgactgcgcggcracttccccacggcgccggcaaggttcctggcgccgcggccgcgcggccgggcgcggcaagttctcgtggtcgtcgggcgccatctacgagggcgacctcgccggcgggtacatgcacggccaaggaacctacatcggcgagctcggggacacgttcgccgggctgtgggcgaacaacctccggcacggccgcggcacgcaggcgtacgtcaacggcgacgtgtacgacggccactggcgcgacgggctgcaggatgggcacggccggtacatctggcgcggcggccacgagtacatcgggacgtggaaggccggcgagatgcacggccgcgggacggtgatatgggcggacggcgaccggtacgacggcgcgtgggaggacgccaagcccaaggggcagggcacgttccggtggtccgacggcgggatgtacatcggcctgtggtgccaggagtccggcgagacgcagggcaagggcgtgtactacccgccgtccggtggcccggcggtgccgttgccccgggaacccaaggaggtgatcacgaagctgctcgaggagctggagatgtccgaggggaagacggtgtcgctgctgccgtcgcagaaggtgctgacatggcccggggtggagcccgtgacgaagaagccggtgtggcggccgccggaggtcgccgctgaccaagggatgtggcggccgccggaggtcggagctgaccaagggaggaggtcgagcaggaggaacagcatgtcgtccgacattgacagcctggttgagggggaggacggcggcgaggagactcgcaacgacaggtcatgggtgcggacaccgtcgtgtatgcgcgcgcccacgctgccgaagccggggaagaagcagggggagaccatctccaagggccacaagaactacgaactgatgctcaacttgcagctgggtatcaggactttgcgcaagctctttgatgttgacccaggagactacatgctctccatttgcggggatgatgcactgctggagctttcatctcccggtaaaagtggaagtttcttttatttcaccaatgatgacaagtacatgatcaaaacaatgaagaaagcagaagttaaagtacttctgaggatgcttccagcctattataaacatgttcgatcttttgataatactctagtaacaaaattttttggcctgcattgtgttaaaattacaggagctattcagaaaaaggttcggtttgttataatggggaatcttttctgctccaactattcaatccacagacgctttgatttgaaaggatcatcacatggtcgcacaacggacaaacccctcgatcaaattgatgagactaccactttgaaggaccttgatctaaatttcattttccggttagagggatcatggtatgaagatttctgcaggagatgcattttaagtcatgggcctgaaaatacttttttcttggttacagacagcagcagtcctgacaacgagacaactcaaactgctcttgaagatgaggaaaaaagaaaagcaccagtcaagctagggattggcatgccctcaagggtggagaatgttgtgaagaatcctgaaagcgaatcccagctcattggcgaaccaacaggggaattccaggacgttatcctgttctttggaatcattgatatcctacaagactatgatatcagcaagaagcttgagcatgcctacaaatccatgcaatatgatcccaactccatatcggctgttgatccaaagcaatactgcaaaaggttcagggacttcatttacagggcttttagtgaagacgtacagtaa

SEQ ID NO: 280 - protein, 720 aa, Oryza sativa
MNPLPPPASRLWEASIRKLKYSTILRGSVVPSGAAFDGAAAAATGGDPVTLTPSLSVSSSTSNTIYQYEDGDDEIESVLDDVDTDDDDLDEASLGEPSHSDQLLPSGDFYQGDCAATSPRRRQGSWRRGRAAGRGKFSWSSGAIYEGDLAGGYMHGQGTYIGELGDTFAGLWANNLRHGRGTQAYVNGDVYDGHWRDGLQDGHGRYIWRGGHEYIGTWKAGEMHGRGTVIWADGDRYDGAWEDAKPKGQGTFRWSDGGMYIGLWCQESGETQGKGVYYPPSGGPAVPLPREPKEVITKLLEELEMSEGKTVSLLPSQKVLTWPGVEPVTKKPVWRPPEVAADQGMWRPPEVGADQGRRSSRRNSMSSDIDSLVEGEDGGEETRNDRSWVRTPSCMRAPTLPKPGKKQGETISKGHKNYELMLNLQLGIRTLRKLFDVDPGDYMLSICGDDALLELSSPGKSGSFFYFTNDDKYMIKTMKKAEVKVLLRMLPAYYKHVRSFDNTLVTKFFGLHCVKITGAIQKKVRFVIMGNLFCSNYSIHRRFDLKGSSHGRTTDKPLDQIDETTTLKDLDLNFIFRLEGSWYEDFCRRCILSHGPENTFFLVTDSSSPDNETTQTALEDEEKRKAPVKLGIGMPSRVENVVKNPESESQLIGEPTGEFQDVILFFGIIDILQDYDISKKLEHAYKSMQYDPNSISAVDPKQYCKRFRDFIYRAFSEDVQ

SEQ ID NO: 281 - DNA, 2888 bp, Oryza sativa
  misc_feature (1538)..(1538): k = guanine or thymine
  misc_feature (1568)..(1568): k = guanine or thymine
  misc_feature (1572)..(1572): r = adenine or guanine
atgcagttttttgttcattcacattctaactgtatttattttcatccacagaacagtgacacattactaggcaatggagttgttgggattcttgccgagactgctaatatgtgggaaaggagagcaccattaaccccatcccattgtgctcgccttctgcttggaggaggcaagaggggaactggggtaaatcggattatcgtgcaaccaagtacaaagaggatccatcatgatgctcaatacgaggatgttgggtgtgagatttcaaaagacctgtcagagtgtggtcttattataggaatcaaacaaccaaagagctggagatgattcttccacatagagcatatggattcttttctcacacccataaggcccagaaagaaaatatgccactattagatgagagatccttgaaaaaagagtatccctgtttgattatgagctaattgctggagatgatgggaaaagattgcttgcatttgggaaatttgctgggagagctggactgatagacttcttacacggtctcggacaacttgagccttggatactcgaccccatttctctctctagggcaatcacatatgtatccttcactcgctgcagccaaggctgcagtcattgccattggtgaagagatagcaacatttggacttccatctggaatttgcccaatagtatttgtattcactggaactggaaatgtctcagggtgcgcaagagatattcaagttactgccccatagctttgttgatgctgggaagcttccagagagtattccagctgtatggttgtgttgtctcttctagagacatggtcactcccaaggatcccaccagatgcttcaacaaatgactattatgctcatccagaacactacaagcctgtttttcatgaaaggattgctccatatgcatctgccattgaactgcatgtactgggagaggaggtttccacgattactgagcattgaccagttacaacaactgatgaagaatggttgccctttggttggtatttctgatataacttgtgacattggaggttccatagaatttgtgaacaagagtacttcaattgagagacctttcttcagggtatgatccttgtactaattcatgccatgatgatatggaaggaaatggtgtgatctgcttagccgttgacattctccctacagaattttccaaagagaggcctcccaacattttggagacatattatccaaattcgttgctagattggcctcagctaaggaactgttggagcttccttcacacttgagaaaagcttgcattgcgcatgctggcagactcacttctctgtatgagtatattcctcggatgagaaagactataattctctcagtggccacctctttgataagttccttattaatgaagctctggatattattgaaacagccggaggttcttttcacttgattagatgcgatgttgggcaaagcattgatgatatgtcatactcagagcttgaagtaggagcagatgatacagctacattggataagattatkgattccttgacttctctagctaatgcacakggaratcctaatgccagaagagaaattgaattatctctaaagataggaaaagtcaatgagtgtggaactgatgacagcatggctaaagaagggtcaaaggttttaattcttggagctggaagagtctgtcgaccagctgctgagtttctggcttcttacaaattcatgttattgtggcgtccctgtaccaaaaagatgcagaagagcaggttgaagtagtagttagcttgctgcctgccagttttcatgctgccatagcaagagtatgcatagagtgaagaagcacttggtcactgcaagctatgttgatgagtccatgtcaaagttggaacaatctgcagaaggtgctggtgtaactattctctgtgaaatgggcctggatcctggcatagtgatgtcaatgaagatgattgacgaagcacattcacggaaggggaaaataaagtcatttacatccttttgtggaggacttccatctccagcttctgcaaacaatccacttgcttataagttcagagttggagtccagctggtgccatccgtgcagggagaaaccctgctgtctacaaatttcatggagaaatcatccatgtagatgataaattgtatgaatccgcaaagaggctcagattaccagaacttccagcttttgcactggaacacttgccaaaccggaattccttgatgtatggagacctgtatgggatctccaaagaagcatctactgtgtacagggctactcttcgttatgaagtttagtgagataatggcaaccttcgcgaaaattgggttttttgatgctgcaagtcatccactgttgcaacaaactactcgccctacatacagggattttcttgttgaacttgaagtctctggaggacaagatggtgaactgatttccagactcttgagttttgggcattgcaaagataaggaaatagctgctaagacagtcaaaacaatcaacatttgatgtgatttgccagcgaatggagcagagaatggcttatatccacaatgagcagatggtactgctgcaccatgaggtggaggtggaataccctgatggccgaccaaccgaaaagcaccaagcaaccctacttgagtttggaaaggttgaaaatggcaggcctaccactgccatggctctcacggtcggaataccagcagcaataggagctctggaaaggagtgatcaggcctctggaacctgaaatttacattccagttggagatcttggagtcatcgggtatcaagctggcggagagagtggagacctgagaatcggacccaatatgtataatgtagcatggtggtag

SEQ ID NO: 282 - protein, 962 aa, Oryza sativa
  misc_feature (513)..(513): Xaa = any naturally occuring amino acid
  misc_feature (523)..(523): Xaa = any naturally occuring amino acid
MQFFVHSHSNCIYFHPQNSDTLLGNGVVGILAETANMWERRAPLTPSHCARLLLGGGKRGTGVNRIIVQPSTKRIHHDAQYEDVGCEISKDLSECGLIIGIKQPKSWRXFFHIEHMDSFLTPIRPRKKICHYXMRDPXKKSIPVXLXANCWRXWEKIACIWEICWESWTDRLLTRSRTTXALDTRPHFSLXGNHICILHSLQPRLQSLPLVKRXQHLDFHLEFAQXYLYSLELEMSQGAQEIFKLLPHSFVDAGKLPESIPAVWLCCLFXRHGHSQGSHQMLQQMTIMLIQNTTSLFFMKGLLHMHLPLNCMYWERRFPRLLSIDQLQQLMKNGCPLVGISDITCDIGGSIEFVNKSTSIERPFFRVXSLYXFMPXXYGRKWCDLLSRXHSPYRIFQREASQHFGDILSKFVARLASAKELLELPSHLRKACIAHAGRLTSLYEYIPRMRKTIILSVATSLISSLLMKLWILLKQPEVLFTXLDAMLGKALMICHTQSLKXEQMIQLHWIRLXIPXLLXLMHXEILMPEEKLNYLXRXEKSMSVELMTAWLKKGQRFXFLELEESVDQLLSFWLLTNSCYCGVPVPKRCRRAGXSSSXLAACQFSCCHSKSMHRVKKHLVTASYVDESMSKLEQSAEGAGVTILCEMGLDPGIVMSMKMIDEAHSRKGKIKSFTSFCGGLPSPASANNPLAYKFRVGVQLVPSVQGETLLSTNFMEKSSMXMINCMNPQRGSDYQNFQLLHWNTCQTGIPXCMETCMGSPKKHLLCTGLLFVMKFSEIMATFAKIGFFDAASHPLLQQTTRPTYRDFLVELEVSGGQDGELISRLLSFGHCKDKEIAAKTVKTINIXCDLPANGAENGLYPQXADGTAAPXGGGGIPXWPTNRKAPSNPTXVWKGXKWQAYHCHGSHGRNTSSNRSSGKEXSGLWNLKFTFQLEILESSGIKLAERVETXESDPICIMXHGG

SEQ ID NO: 283 - DNA, 499 bp, Oryza sativa
atggcggcgccggatgttgagtaccgctgcttcgtcggcggcctcgcctgggccaccgacgaccgctccctcgaagccgccttctccaccttcggcgagatcctcgagtccaagatcatcaacgatcgggagacggggaggtcgcgcgggttcgggttcgtgacgttctcgagcgagcaggccatgcgcgacgccatcgaggggatgaacggcaaggagctcgacggccgcaacatcaccgtcaacgaggcccagtcgcgccgctccggaggcggaggcggaggcggctacggccagcgcggcggaggcggaggctacggtggcggcggcggctacggtggtggcggcggcggtggccggcaactccgacgggaactggaggaactgaggcggcggcggcggcggcggggggagacatgagagatggaggaggaggaaggcgatggatacatgggctgatgttagaggcccggacggttcattgggccgtcggatttag

SEQ ID NO: 284 - protein, 166 aa, Oryza sativa
  misc_feature (122)..(122): Xaa = any naturally occuring amino acid
MAAPDVEYRCFVGGLAWATDDRSLEAAFSTFGEILESKIINDRETGRSRGFGFVTFSSEQAMRDAIEGMNGKELDGRNITVNEAQSRRSGGGGGGGYGQRGGGGGYGGGGGYGGGGGGGRQXPTGTGGTEAAAAAAGGDMRDGGGGRRWIHGLMLEARTVHWAVGF

SEQ ID NO: 285 - DNA, 3042 bp, Oryza sativa
atggctacagagagcgctgtccggttaattggaggaacggggtctggtaactggagcaaggacttcggtgcatttgactcatcactgggtagtctttcaggagaaggtctggggtttgtggacaataacagtggcgtttatgggggctggagggagtctgtcccaaatcgcagtggaagtgcgccgcctagcatggaagggtctcttgctgctcttggtcatatgataggtcagcagagtgggaacttggaagccactttaggggggaagctgggaaacgtagcggacagttccaaatctgaggagcagctacgtgctgatccggcatactgtgactattatggctccaaggtcaatttgaacccaaggcttccgccaccacttatgtctagggagagcagacgcttcatgaaccgggttggcaaagttaaagaatggagagtggtttctcaagatgacagcaacaaaggttccttgtttattcctcgatctactctgtcaacacacagagaagagcctgaggacgataggtcaccaaggttggattcaagttcagcagaggatgcccaaggttctggtaaaagtggatccaactttgatagccattatacttgtatgaatcttggagattttgcatcggagagttttcagcagaaagccgcttctttgtatgacagttctactcatccatcaaatagcaatactggtgatggtatatctgaccattctgacattaactcatcaacgaatttttcaattgatgctgtcaagacatctgggttgaattcatggacacctgttcctgtgactaacacagtgagaagtacacatagcaacagtatttcatctacatctgttcccagttcatcaagtcctgataacaaccccagtatgcaaacttctcagcaagagaagcctagcatagacatcaagcatgggaatgatgtgcctggcagcggttctattctgactgaactagatactgtgaactccaatatgaagaatctgaggataagtttggatagccatgataccatacatgttaagcagcagtggccggacaatgtcttgcagcagtttggcccctcacctttagtccagggtgatcctattcaaatgattcctcaaggaacacatcttccccatgttccttttgttgagaacttgtcgcatactcaattaaaattaccaactggtgacatgcagcaatttttaccaccgcctggtatgacaacacctttttatgcaccaaattcttttggaagcccttactatcaaaatttgcatccggctagtgtattgccaacaccatttggaactgctggatatgctttgagtggttcagctttaccacctgttatgactagctatgctccccaggtttctgttgctacacctgttgacagccctattactccaagctttagtggtagaccatctggttttccttcaccagggaatcttagtgcaggagcagaatttgttcagccatataaaatgtatggacaacaacttggggttaccatgcagccatccgttcctgacccaaacttctttcagttctttcagcatccttctttactttcatatgctggtataaatcaatacaatacaatgggaccaagggttagtgttgttgggaatcctgctgatagttttgatccccaaaaggtattatcccagcctgcgtatccatctgatcagaggcttcaacttccaagaactggaatttataactctcctgcagccagaagaggaggggccgctccaaattatcaaggcatgacaccatatgttggagcaccaatgacttacccaacaagcccagtgtttcagggacagactttcactggagtattttctcctggtaggagaaatgattctgtgagattccaaactccctcaagaaatatgaccgcttattctggtgttcaagggcagcgagaaagggagaaattcgatgacccaaaggcatgttccttcctggaagaactcaagtctaacagggctcgcagggttgaactatctgatattgcaggccatatagtagaatacagcgctgaccaacatggcagccgattcatccaacagaagttagagaactgcactgctgaagagaaggcatctgtgttttcagaagttctccctcatgcttcatcattaatgactgatgtgtttgggaattatgtgatccaaaagttcttcgaacatggaactcctgaacaaaggagggatcttgccactaagcttgttggtcatgttttacctttgagccttcaaatgtatggatgccgagtaattcaaaaggctcttgaagttatggaacttgaccaaaaaatagaactagttcgtgagcttgatggaaacattatgcgatgtgtccgtgatcaaaatgggaaccatgttatacagaagtgcattgaatgtgttcctacagaacatattggctttgtagtatctgcttttcgggggcaggtggccagcctttcaatgcacccatatggttgccgtgttattcagagagttttggagcactgcggtggtgattcacaaggccagtgcataatagatgagatactggagtcggcttgcgtcctcgcacaagatcagtatggcaactatgttacacagcatgttttggaaagaggaaggggacatgaaaggacccaaattatcagtaaattggctgggcaggttgttaccatgagtcaaaacaaattcgcatcaaatgtgatagagaagtgctttcaacatggggatatgacagagcgagatcttctgatccgggagattgtgaagcagactgagggcaatgataacttgctggcgatgatgaaggaccagtatgcaaactatgtagttcagaagatacttgaaacatgcaacgagcaacagagagagctcctgctcagccgtgtgaagggccatctgcaagcattaaggaagtacacctatggcaagcatattgagacaccgagtcagattcttgaaaaattagcatatttcttcactggaggtgtatgcctggagccctcaagatga

SEQ ID NO: 286 - protein, 1013 aa, Oryza sativa
MATESAVRLIGGTGSGNWSKDFGAFDSSLGSLSGEGLGFVDNNSGVYGGWRESVPNRSGSAPPSMEGSLAALGHMIGQQSGNLEATLGGKLGNVADSSKSEEQLRADPAYCDYYGSKVNLNPRLPPPLMSRESRRFMNRVGKVKEWRVVSQDDSNKGSLFIPRSTLSTHREEPEDDRSPRLDSSSAEDAQGSGKSGSNFDSHYTCMNLGDFASESFQQKAASLYDSSTHPSNSNTGDGISDHSDINSSTNFSIDAVKTSGLNSWTPVPVTNTVRSTHSNSISSTSVPSSSSPDNNPSMQTSQQEKPSIDIKHGNDVPGSGSILTELDTVNSNMKNLRISLDSHDTIHVKQQWPDNVLQQFGPSPLVQGDPIQMIPQGTHLPHVPFVENLSHTQLKLPTGDMQQFLPPPGMTTPFYAPNSFGSPYYQNLHPASVLPTPFGTAGYALSGSALPPVMTSYAPQVSVATPVDSPITPSFSGRPSGFPSPGNLSAGAEFVQPYKMYGQQLGVTMQPSVPDPNFFQFFQHPSLLSYAGINQYNTMGPRVSVVGNPADSFDPQKVLSQPAYPSDQRLQLPRTGIYNSPAARRGGAAPNYQGMTPYVGAPMTYPTSPVFQGQTFTGVFSPGRRNDSVRFQTPSRNMTAYSGVQGQREREKFDDPKACSFLEELKSNRARRVELSDIAGHIVEYSADQHGSRFIQQKLENCTAEEKASVFSEVLPHASSLMTDVFGNYVIQKFFEHGTPEQRRDLATKLVGHVLPLSLQMYGCRVIQKALEVMELDQKIELVRELDGNIMRCVRDQNGNHVIQKCIECVPTEHIGFVVSAFRGQVASLSMHPYGCRVIQRVLEHCGGDSQGQCIIDEILESACVLAQDQYGNYVTQHVLERGRGHERTQIISKLAGQVVTMSQNKFASNVIEKCFQHGDMTERDLLIREIVKQTEGNDNLLAMMKDQYANYVVQKILETCNEQQRELLLSRVKGHLQALRKYTYGKHIETPSQILEKLAYFFTGGVCLEPSR

SEQ ID NO: 287 - DNA, 1486 bp, Oryza sativa
  misc_feature (1350)..(1350): s = guanine or cytosine
atggctcaccggctgctgcgagacgcgcaggcggacgggtgggagcggtccgacttccccatcatctgcgagtcctgcctcggcgacaacccctacgtccgcatgatttactgtctttcttgtttgtcttggcagttgagagcagaatatgataaagagtgcaaaatatgtgcacgtccgtttactgtcttccgttggcgacctggccgggatgcaagatacaagaagacagagatctgccagacatgttgcaaactgaaaaatgtctgccaggtctgcctgctagatcttgaatatggtctaccggtccaggttagggatacagcactcgctattaattcaaatgatgcaatcccaaggagtgatgtgaaccgtgagtactttgcagaagagcatgatcgcaagaggccagggctggaatagattatgattcttcccatgggaaggcacgtcccaatgacaccattctgaagcttcagaggacggcaccatattacaagaggaatcgagctcatgtctgcagtttctatgtgcgtggtgaatgtacaagaggtgctgaatgcccttatcgacatgagatgcctgaaactggagagttatctcagcagaacattaaagatcgttactatggtacagagttaatgatccagttgctttgaaacttttgggtaaggccggtgagatgccatccctgacacctccagacgatgagagtataaggacactttacattggtggccttaataatcgaatcaccgagcaggatttgagggatcaattttacgcacatggtgaaattgagtccataaggatggttctgcaacgtgcctgtgcatttgtgacgtacactacaagagaaggtgctgagaaagctgcagaggagcttgccaacaagttagtcatcaagggtatacgcctgaagctcatgtggggtaagcctcaagcaccaaagccagaagacgatgaagctggaaggcaagggcatgttgcacatggaggaatgctccccagggctgttatatctcagcagcagagtggtgaccagcctcaaccacctggaatggagggacaacagcaagcaccatcgggatcatactacttcaacattccagcaccgccaggagcagagcggacactgtacccttcaatggatccccagaggatgggtgccttggtcaagtcacaggagggtgatggcaaacccggtccacagcaggcagcccaagctcaggcatcaagcagctcaggacagagttaccctatgccaccacaatattaccatggtcagtacccaccctactacccaccgtatggcggttacatgcccccacctggcatgccatacccacsgccaccgcagtatccgccttatcagccgatgttggcaacaccagcacagtcgcaagctagctcatcacaacaacctgcaccagcaacgctgcaccaggctcaagtccctcctccgcagcagacgacccagaactga

SEQ ID NO: 288 - protein, 495 aa, Oryza sativa
  misc_feature (73)..(73): Xaa = any naturally occuring amino acid
  misc_feature (451)..(451): Xaa = any naturally occuring amino acid
MAHRLLRDAQADGWERSDFPIICESCLGDNPYVRMIYCLSCLSWQLRAEYDKECKICARPFTVFRWRPGRDAXRYKKTEICQTCCKLKNVCQVCLLDLEYGLPVQVRDTALAINSNDAIPRSDVNREYFAEEHDRKARAGIDYDSSHGKARPNDTILKLQRTAPYYKRNRAHVCSFYVRGECTRGAECPYRHEMPETGELSQQNIKDRYYGYRVNDPVALKLLGKAGEMPSLTPPDDESIRTLYIGGLNNRITEQDLRDQFYAHGEIESIRMVLQRACAFVTYTTREGAEKAAEELANKLVIKGIRLKLMWGKPQAPKPEDDEAGRQGHVAHGGMLPRAVISQQQSGDQPQPPGMEGQQQAPSGSYYFNIPAPPGAERTLYPSMDPQRMGALVKSQEGDGKPGPQQAAQAQASSSSGQSYPMPPQYYHGQYPPYYPPYGGYMPPPGMPYPXPPQYPPYQPMLATPAQSQASSSQQPAPATLHQAQVPPPQQTTQN

SEQ ID NO: 289 - DNA, 1308 bp, Oryza sativa
atggcgtcgtcgtccgtcttcgctggcctcgcgcaggcgccggaggaccccatcctcgggggtgacggtcgcgtacaacaaggatcccagccccgtgaaggtcaatctcggcgtcggcgcctaccggaccgagaggaagggaagcccctggtgctgaatgtggtcaggcgcgctgagcagatgctgatcaacaacccgtcacgtgttaaggagtatttgccgatcactggactggccgatttcaataagctgagtgctaagcttatttttggtgctgacagacagtcctgccattcaagagaatagggtggctacagttcagtgcttgtcaggaactggttctttaagggtgggaggtgaatttcttgcaaggcattatcatgaacgcactatatacatcccacagccaacctgggggaatcaccccaaagtgttcactttagctggcctgactgttaggagttaccgctactatgatcctgcaacccgtggactggatttccaagagggctgttagaagatctcggttcagctccttcaggtgcaattgtactgcttcatgcttgtgcccacaaccctactggagtagacccaactttggaccagtgggaacagatcaggcagttgatgagatcaaaagcattgctgccattctttgatagcgcttatcagtcagggatttgcaagtggaagtcttgaccaagatgctcaatcagtgcgcatgtttgttgctgatggtggtgaattgctcatggctcagagctacgctaagaacatgggattgtatggagagcgtgtcggtgctttaagcatagtttgtggaagtgctgatgtagctgtcagggttgaaagtcaacttaagcttgtaattaggcctatgtattcaaaccctcctattcatggtgcatctatcgtggctaccatacttaaggacagtagtgcaatgttcaatgaatggactgtggagctgaagggcatggctgataggattattagcatgaggcaacagctttttgatgctctgaaaacgagagagaaactcctggagactggagtcacatcattaagcagatcggaatgttcactttcactgggctcaacagtgatcaagtggctttcatgaggcaggaataccacatttacatgacatctgatggggaggatcagtatggctggtttgagcgggaggaccattccgcatcttgcagatgcaatccatgccgcagtcacaaaactgaagtgaatgatggtagcatagcagctccctccaagaataacatcttaaaaccatccgcagcagtgttctga

SEQ ID NO: 290 - protein, 413 aa, Oryza sativa
  misc_feature (44)..(44): Xaa = any naturally occuring amino acid
  misc_feature (169)..(169): Xaa = any naturally occuring amino acid
  misc_feature (344)..(344): Xaa = any naturally occuring amino acid
MASSSVFAGLAQAPEDPILGVTVAYNKDPSPVKVNLGVGAYRTXEEGKPLVLNVVRRAEQMLINNPSRVKEYLPITGLADFNKLSAKLIFGADDSPAIQENRVATVQCLSGTGSLRVGGEFLARHYHERTIYIPQPTWGNHPKVFTLAGLTVRSYRYYDPATRGLDFQXGLLEDLGSAPSGAIVLLHACAHNPTGVDPTLDQWEQIRQLMRSKALLPFFDSAYQQGFASGSLDQDAQSVRMFVADGGELLMAQSYAKNMGLYGERVGALSIVCGSADVAVRVESQLKLVIRPMYSNPPIHGASIVATILKDSSAMFNEWTVELKGMADRIISMRQQLFDALKTXRETPGDWSHIIKQIGMFTFTGLNSDQVAFMRQEYHIYMTSDGRISMAGLSGRTIPHLADAIHAAVTKLK

SEQ ID NO: 291 - DNA, 1365 bp, Oryza sativa
  misc_feature (90)..(90): r = adenine or guanine
  misc_feature (96)..(96): r = adenine or guanine
  misc_feature (1298)..(1298): m = adenine or cytosine
  misc_feature (1304)..(1304): s = guanine or cytosine
  misc_feature (1310)..(1310): m = adenine or cytosine
  misc_feature (1313)..(1313): s = guanine or cytosine
atgggcgccgaggaggaggaggagccggcgtcggccgtcgggagggaggggggaggaggaggaggcggggcgagggccgcgggggcgggrgcgggrggagacaccgccgacgacgacgacagcggggagagcgccgcggcggtggtcccgtgctcgatctgcctcgacgcggtggtcgccggcggcggggacaggtccacggcgaggctgcagtgcggccacgagttccacctcggattgcattggttcagcatttaatgccaaaggagttatgcaatgccccaactgtcgccaaattgagagggggaattggctctatgcaaatggttcgcgtccatcacaggatgtaagtaatgatgattggggtcatgatgaagacttttatgatgctaatcaaccagagacatcaaggagtgtctttttgccattccgcttccaatggtgtcctattggccgcttagcccaacttccatctgtatttgagaaggagagtcagcaccacccgtaacctcatgatttcatgggacagaacttcacttctgagcatttgcctgtatcagcacctggggcaactcctccaggcccatatatcgcttactttcagcctcttcaatcatcggcatcatcatcaagttcccatgtcactgaaagaactatggatggcaccacctatcatgatcactggaaccccctacctgggccatcagatggtcgaccattggctacagtgcatcccattgatttccatcataaccactggacgcacctgcccaactcctattctcaacccaacagcaataatggtgtagctgagcagatggcaatccctgtggtaccaatgagggttgggggccttgatagtgatagccaacagcgaggatctctcccctcagtttatggaaatggtctggatcaaggtctagaattccaagtgttcctcctatggcaccacaattcatgaggccgcatggtaacatcaacgaacaatatcagcagaattcgtccagcctgtatgctgcgccgcagcgtaggactgccgtgcaggctgtccaagacagcatgaactttaccctgttcccgcaggctccaactggccctaattcaatggagacggaggatgccggaggcaaccagttctatgcctgggagagggaccgcttcgccccttacccgctaatgcccgtagattctgaagcaaactggtggggcagcacgccgcaatcccatggcgtgacggatcattcagctgcccccggtaggaggctatttggtcaatggatcggcgccgggaggtcgcmacggcsgcttcmacsgccaccagcggacaactcgtcgtaccgacagatgcacatccctcggatgtag

SEQ ID NO: 292 - protein, 454 aa, Oryza sativa
  misc_feature (433)..(433): Xaa = any naturally occuring amino acid
  misc_feature (435)..(435): Xaa = any naturally occuring amino acid
  misc_feature (437)..(438): Xaa = any naturally occuring amino acid
MGAEEEEEPASAVGREGGGGGGGARAAGAGAGGDTADDDDSGESAAAVVPCSICLDAVVAGGGDRSTARLQCGHEFHLGLHWFSIXCQRSYAMPQLSPNXEGELALCKWFASITGCKXXXLGSXXRLLXCXSTRDIKECLFAIPLPMVSYWPLSPTSICIXEGESAPPVTSXFHGTELHFXAFACISTWGNSSRPIYRLLSASSIIGIIIKFPCHXKNYGWHHLSXSLEPPTWAIRWSTIGYSASHXFPSXPLDAPAQLLFSTQQQXWCSXADGNPCGTNEGWGPXXXXPTARISPLSLWKWSGSRSRIPSVPPMAPQFMRPHGNINEQYQQNSSSLYAAPQRRTAVQAVQDSMNFTLFPQAPTGPNSMETEDAGGNQFYAWERDRFAPYPLMPVDSEANWWGSTPQSHGVTDHSAAPGRRLFGQWIGAGRSXRXLXXPPADNSSYRQMHIPRM

SEQ ID NO: 293 - DNA, 2568 bp, Oryza sativa
atgtggtccggacgtcacatgcatgtaggatgggaaaagcgggctgttgcgcgcgccctaaaacaacggtacacattacgcaggttttcgagagctttttggaatttagagggaatctcattttcacttgtcagccaggagaacagtgagcacccgttcttcaggaaatctggcaatctccatgggtctcaaacacacatcgaacctgaaaagtgccagttgccaggtaagtgtgccacacatgaagatgaggacagagacaatatgatcttcctcgtgttctatgtgtttgtggtgttactaggagagttctgctcctcttgctcttgtgctcaggtttatgtggtctacatgggcaaaggattgcaaggcagcactgagaatcggcatgacatgctgaggcttcatcaccagatgctgacagctgttcatgacggaagcttgactaattggatgcttggtctcagcatggagaaggcagaggcatcgcatgtctacacttacagcaacggtttccaaggatttgcagcaaagctgaacaaacaacaagccatgaaattagccagtaatttccttatatgccctggtggtccatcctcagtgttcccaaacacaaagaggagcctccacaccactcattcatggggatttcatgggcttgtccgtcgatgcagcggctcagctacctgcattgcagcggctgagctacctgaattgtcaagcaagaaccaggagaatgtcattattggatttattgacacaggaatatggccagaatctcctagtttcagagatcatggaatgcctccggttcctacaagatggagagggcaatgccagcggggagaggcaaactcaccatcaaatttcacctgtaacaggaagataataggaggtaggtattatctcagaggataccaaacagaagagagcggccagagtagaagtgccatcaagttcatatctccaagagatagctcagggcacggcagccacactgcctcaatagcggcaggaaggtttgtgagaaacatgaactacagaggtttgggtacaggaggaggccggggaggagcacccatggcaaggattgctgcctacaagacctgctgggactcgggatgctatgatgctgatattcttgcggcgtttgatgatgccattgctgatggcgtcgacattatctcagtgtctctagggccagactatcctcagggtggttacttcaccgatgccatatccatcggctcgttccatgcaaccagcaatggaatactggttgtttcttctgcagggaatgctgggagaaagggctcagcaactaatcttgcaccatggatactgacagttgctgcaggaacaacggatagatcatttccttcctatatcaggctggcaaacggtaccttgataatgggtgagagcttgagcacataccacatgcacacctcagttaggactatttcagcttccgaagccaatgcaagctctttcactccctaccaatccagcttctgcctggacagctctttaaataggacaaaagcaaggggaaagattctcatttgccaccgtgctaaaggctcatcggactctcgtgtatcaaagagtatggtagtgaaggaagctggtgcccttggaatgattctcattgacgagatggaggatcatgttgctaatcactttgctcttcctgctactgttgttgggaaagcaacgggtgacaaaattctttcctatatcagtagtacaaggttttctgccaaatattgcagttactttcaaaaagggtgtggcagtacgatgatcttaccagcgaagacgattttaggttctagagatgctccccgggtggcggccttctcttcaagaggcccaaattcattgacaccggagattctgaagccagatattgctgctcccgggttgaacatattggcggcatggtctcctgctaaggaggacaagcacttcaacatcctttctggaacttccatggcgtgcccccatgttacaggaatagctgctcttgtcaaaggtgcatatccatcatggtctccttctgcaatcaaatcagcaatcatgacaacaggttttgcggatcccatcaaagctcttaatccagggatcatctttgacgcacatcctgaagattacaagtcattcctatgttctataggctatgatgaccactccttacatctaataacacaagataacagcagctgcactgacagagctccatcatcagctgctgctctaaattacccatcaattaccataccaaacctgaagaagagctactcagtcactcgaactatgacgaatgtaggattccgaggaagtgcttaccatgctttcgtgtctgctccactgggtatcaatgtcacggtgactccaaaagttctagtcttcgagaattacggtgcgaagaagactttcacggttaacttccatgtggatgtgcctcaacgggatcatgtatttggttccttgttgtggcatggaaaggatgctcgactgatgatgccattagtagtaaaagttgatactgcagcaaaggcttga

SEQ ID NO: 294 - protein, 855 aa, Oryza sativa
MWSGRHMHVGWEKRAVARALKQRYTLRRFSRAFWNLEGISFSLVSQENSEHPFFRKSGNLHGSQTHIEPEKCQLPGKCATHEDEDRDNMIFLVFYVFVVLLGEFCSSCSCAQVYVVYMGKGLQGSTENRHDMLRLHHQMLTAVHDGSLTNWMLGLSMEKAEASHVYTYSNGFQGFAAKLNKQQAMKLASNFLICPGGPSSVFPNTKRSLHTTHSWGFHGLVRRCSGSATCIAAAELPELSSKNQENVIIGFIDTGIWPESPSFRDHGMPPVPTRWRGQCQRGEANSPSNFTCNRKIIGGRYYLRGYQTEESGQSRSAIKFISPRDSSGHGSHTASIAAGRFVRNMNYRGLGTGGGRGGAPMARIAAYKTCWDSGCYDADILAAFDDAIADGVDIISVSLGPDYPQGGYFTDAISIGSFHATSNGILVVSSAGNAGRKGSATNLAPWILTVAAGTTDRSFPSYIRLANGTLIMGESLSTYHMHTSVRTISASEANASSFTPYQSSFCLDSSLNRTKARGKILICHRAKGSSDSRVSKSMVVKEAGALGMILIDEMEDHVANHFALPATVVGKATGDKILSYISSTRFSAKYCSYFQKGCGSTMILPAKTILGSRDAPRVAAFSSRGPNSLTPEILKPDIAAPGLNILAAWSPAKEDKHFNILSGTSMACPHVTGIAALVKGAYPSWSPSAIKSAIMTTGFADPIKALNPGIIFDAHPEDYKSFLCSIGYDDHSLHLITQDNSSCTDRAPSSAAALNYPSITIPNLKKSYSVTRTMTNVGFRGSAYHAFVSAPLGINVTVTPKVLVFENYGAKKTFTVNFHVDVPQRDHVFGSLLWHGKDARLMMPLVVKVDTAAKA

SEQ ID NO: 295 - DNA, 507 bp, Oryza sativa
atggctgccttgccattagccaccgctgaagtatgtgatgcaaatgcagatttaatcatgaatggtgagcttcgtgctctccagcccatcttccaaatctatggaaggcggcaggtttttgctggccctattgtgacactgaaggtctatgaggacaatgttcttatccgtgagttccttgaggagaagggtcatggaagggttctcgtggttgatggtggtgggagcttgcgctgtgccattttgggtggcaaccctgtgcagcaggcacagaacaatgggtgggctggcatcgtcgtcaatggttgcatcagggacgtggatgaaatcaatggctgtgacattggtgtccgggctctgaactcacatcctatgaaggcaaacaagaagggaataggtgagaagcatgtgcctgtgaccatcgcagggaccaggatttgcgacggtgagtggctctatgcagataccgatggcattctcatctcgaggactgaattgactgtgtaa

SEQ ID NO: 296 - protein, 168 aa, Oryza sativa
MAALPLATAEVCDANADLIMNGELRALQPIFQIYGRRQVFAGPIVTLKVYEDNVLIREFLEEKGHGRVLVVDGGGSLRCAILGGNPVQQAQNNGWAGIVVNGCIRDVDEINGCDIGVRALNSHPMKANKKGIGEKHVPVTIAGTRICDGEWLYADTDGILISRTELTV

SEQ ID NO: 297 - DNA, 3069 bp, Oryza sativa
  misc_feature (84)..(84): m = adenine or cytosine
  misc_feature (156)..(156): n = any nucleotide
atggcgcaagaccgacaaaagaacaaagtattagcagcctcagatgctagcaatagcggtggcgagttcctcacttcgaattcmgttgagaaattatcactaaaaatgatcaccttttgttgtccagcaaaatggctacagagagtgctcggccgnttgagtggaggaactggagcagggaagtggccaccaagcaaggacacgggttcctatgattctattccagctagcctttcagaagatgagttagcggagttggccttcatgccaaatagtggcggcatttttgggaagtggaggggttctgtcctggaacgcagtggaagcgctcctcctaccatggaaggttctttagttgcacttggtcacctcacaggtcaaccgagtggcaaccttggggccatactgccaaacttgggcactgaagctaacaattcagagtctaaggagaatatatattatgattcggcatgcgtcaaatactatatgtccaaggtgaatttgaacccaaggtttcctccaccactcgtttcaaggaaccagtttggcaagtctgaagaacgaaagccgttctcccttgatgacagcagcagcaggtccttacttcttggtcatcctactctgccaacacacaaggaagaacctgaggacgaaaagtcaccaagtttggattcaagttcagcagacgatgctcaatgtgattctgcccaaagcacatctaacttagggggccacagtccaaatcttgtagattcaattaaggaaaactttcatcggagcaatggtttgtatgataattcttccgatcttttaaatgcaaactctggtgatggagggtcgatttattctggcattagttcattgaagaattcctcactttatgttgtccagtcatcagacttgaatggatttccaccagatgctcatcagcgttcccctagacctattaggactccagtcagtacaaaacttactagcgacagtctgccagcttcatctcctcccacttcatcctgttctgactacagtactattactgaagcttgtcagcaaagaaatccaagcatggccgttaaacctggtgaaccagttggtaccatgcttgatagttcagacttcagtctgaagaatttgaatattagtccggatatcctaagtagttcatatgtcatgcaacagtggcagaaaaatgccccagtgtggaatggcctatcaaatgtagtccatggcgatcatgtgccaatgattcctccaggaattaatcttcctcaagttccatttgtggacaattccggttttggtcatatgaagttccctggtgatgttcaactgatgtcccagatcgggatggcaacacctttttgtacaccaaattcttttgggataccatgttatcctaatttgcagtcgcctagtgtttgggttcctccattcggaatcggcggctatggtttgcctggtccatttgtcccacctgttataactaacttcactcctcaacttcctggttttccttcagcagtaaatcttgctgcagcaactgacttatttcacccatataagatgtatgagcatcttggggtacctatgccatcccctgttcctgatcagagccttacgcattattttcaacagccccctatccatccgtatggtgttggaaatccatatgatacaatggtttcaagtaataattttgtagggaatcctgctggcgtttttggttcaccaatcattgacccatcagagcagaagtttcagataccggttactactgtagctgctaatgcctctactcccatcaaaggtggaaagcccattgggaattatgagactgcctcaccttactttggcgtaccgatgccttatccagcaggtccaacattacatgggcaacctgcttctggaacatctcctcgtgacaaaaggaacgatgtcaagggattccaaccccctcgaaaaaatatgcctgttagttccgagatacaaggtcagaaagggagggagaagtttgatgatcccaaggcacacttttctgttgaagaactaatatccagcagaactcatagggttgagctggctgacatcaaaggacagatagtgaaatacagctcggaccaaaatggtagccggttcattcagcagaaactggagaattgcaccattgaagaaaaggatttactttttgccgaggtccttcctcatgctttggaattgatgactgatgtattcggaaattatgttattcagaagttggcaaagtattatctgagtaaaatttcttcagactgttattctatccatagaattgtttattctgaacatcagttggcccttgaagtaattgatcttgaacagaaaattgttcttgttggtgaactcgatggacatgtgctgcgatgtgttcatgaccaaaatgggaatcatgttatacaaaaatgcattgaatgtattccattggaacatattggttttctggtgtcatcttttcagtgccaggttgccaaactgtcaatgcatacatatggatgtcgtgttattcagagaatcctcgagcgttgcagcaataattctgaatgcctttgcataattgatgaaatcttgcagtctgcttgcatcctcgcacaagatcagtatgggaactatgttgtgcagcatgttttggagaaagggaatgaacatgaaaggggccaaatcatcactaaattggctgggcaggtagtgcccatgagccaaaacaaatttgcgtctaatgtcatagagaggtgttttgaacatgggggcagtgcagagcgggaacttttggtcaaggagattctgaagcaaactgagggcaataactatttgctggtgataatgaaggaccagtatgctaattatgtggtacagaagatgcttacaacatgcaatgaacaacataaggagatccttctcagtcgtgtgaaaatccatttgccattattgaagaaatacacctatgccaagcacatcgtcagcctagtcgagcgcctctgcggtgacggagctgtgcagtccgaatccaaaaaaactgtaaccaagggctgctga

SEQ ID NO: 298 - protein, 1022 aa, Oryza sativa
MAQDRQKNKVLAASDASNSGGEFLTSNSVEKLSLKMITFCCPAKWLQRVLGRLSGGTGAGKWPPSKDTGSYDSIPASLSEDELAELAFMPNSGGIFGKWRGSVLERSGSAPPTMEGSLVALGHLTGQPSGNLGAILPNLGTEANNSESKENIYYDSACVKYYMSKVNLNPRFPPPLVSRNQFGKSEERKPFSLDDSSSRSLLLGHPTLPTHKEEPEDEKSPSLDSSSADDAQCDSAQSTSNLGGHSPNLVDSIKENFHRSNGLYDNSSDLLNANSGDGGSIYSGISSLKNSSLYVVQSSDLNGFPPDAHQRSPRPIRTPVSTKLTSDSLPASSPPTSSCSDYSTITEACQQRNPSMAVKPGEPVGTMLDSSDFSLKNLNISPDILSSSYVMQQWQKNAPVWNGLSNVVHGDHVPMIPPGINLPQVPFVDNSGFGHMKFPGDVQLMSQIGMATPFCTPNSFGIPCYPNLQSPSVWVPPFGIGGYGLPGPFVPPVITNFTPQLPGFPSAVNLAAATDLFHPYKMYEHLGVPMPSPVPDQSLTHYFQQPPIHPYGVGNPYDTMVSSNNFVGNPAGVFGSPIIDPSEQKFQIPVTTVAANASTPIKGGKPIGNYETASPYFGVPMPYPAGPTLHGQPASGTSPRDKRNDVKGFQPPRKNMPVSSEIQGQKGREKFDDPKAHFSVEELISSRTHRVELADIKGQIVKYSSDQNGSRFIQQKLENCTIEEKDLLFAEVLPHALELMTDVFGNYVIQKLAKYYLSKISSDCYSIHRIVYSEHQLALEVIDLEQKIVLVGELDGHVLRCVHDQNGNHVIQKCIECIPLEHIGFLVSSFQCQVAKLSMHTYGCRVIQRILERCSNNSECLCIIDEILQSACILAQDQYGNYVVQHVLEKGNEHERGQIITKLAGQVVPMSQNKFASNVIERCFEHGGSAERELLVKEILKQTEGNNYLLVIMKDQYANYVVQKMLTTCNEQHKEILLSRVKIHLPLLKKYTYAKHIVSLVERLCGDGAVQSESKKTVTKGC

SEQ ID NO: 299 - DNA, 1134 bp, Oryza sativa
atggcggcggcggcggcggcgggggcggcggcgggtggggggttcgttggggagaggaggaagctgttcgtgggagggatcccgacgtcggcgcaggaggcggagctgcggggccacttcgggcagtacggggcggtgaggtcggtgatcgtgatgcgggacaaggagaccgggcatggccgggggttcgggttcgtggagttcgaggaggaggaggacgccgccagggcgctcggcgacggggagcaccccaggcacctcatctgcggccgcgtcgttgatgtcaagagggctagggcaaggcctcaacgaaaccatgatgatcaatcttcacagcatcagcacttcggacagggtcaggatcagggtcaccagccagcacctgtgagtggtacagaggatggcggcgacggcatgaactatgcttcgaagaaggtctttattggtggtctgcgggacaacatcactgaggaggagttcaagacatatttcgagagttttggcaccgtaacagatgtggtagtcatatatgacagtatgacaaacaggtctagggggtttggtttcgtcacctttgactcagaggaagcggtgaggaaggtgatagaacacagttttcatgacttgaaaggaacaagggtagaagccaagattgccatccccaaggatgcttcgtattaccgtaatggcagaggtcgtggctcaagaaactttggtggaaggggtcatgctggttttgatggtccctcgtaccaaccatacaatgacagatatggtttctacaacagctataatatgcctcaacctgttccaccacatccctactatcctggtgtatattatggtatgggaggaggttatccctatgcgaatgcatattcaaacatgggagcccctgctaatattcctccaggcatgatgacaaggcgtccagtttatggtgcatatcctccaatgtttccagggtacggcgttatatatagaggttatgtgggtgctgcaccctctattcagcatgatagtaatggtgggagcgatagcaaaaaggatcaaacttcagtagatgtacaagaagttgacagtgctgcttccgttgcaacaaaacttgagtttatgaagctagggtcacaatga

SEQ ID NO: 300 - protein, 377 aa, Oryza sativa
MAAAAAAGAAAGGGFVGERRKLFVGGIPTSAQEAELRGHFGQYGAVRSVIVMRDKETGHGRGFGFVEFEEEEDAARALGDGEHPRHLICGRVVDVKRARARPQRNHDDQSSQHQHFGQGQDQGHQPAPVSGTEDGGDGMNYASKKVFIGGLRDNITEEEFKTYFESFGTVTDVVVIYDSMTNRSRGFGFVTFDSEEAVRKVIEHSFHDLKGTRVEAKIAIPKDASYYRNGRGRGSRNFGGRGHAGFDGPSYQPYNDRYGFYNSYNMPQPVPPHPYYPGVYYGMGGGYPYANAYSNMGAPANIPPGMMTRRPVYGAYPPMFPGYGVIYRGYVGAAPSIQHDSNGGSDSKKDQTSVDVQEVDSAASVATKLEFMKLGSQ

SEQ ID NO: 301 - DNA, 468 bp, Oryza sativa
atgagaggtcggccgctgatggtgacagctcagtacgggtattcctccaaacaaaaggggaccgggcggccctcgggagaggcggcggcggaggacccgacggccctcgggagaggcggcagtggtggttcggcgtgcgcggtgcatggcggcggtgaggagggcttgacggcgtgcagatgcggtcgcctcctagaggtcggggttgaccggatccggcggcggcctccaactccacgcgcgagcaccggccgtcgtcctcaccgtttcaagcaccgaccgccaccgccaccactgaggtcgggggacgctggatccagcctcctagaggtcgggggacgccagatccggcactggacagccttctcctcttccgtccccaagcgccctcctccgagagctagtcacctcctcctgcatcctcgcgcggccaccgccatagcttcctccaccattcccaagtactga

SEQ ID NO: 302 - protein, 155 aa, Oryza sativa
MRGRPLMVTAQYGYSSKQKGTGRPSGEAAAEDPTALGRGGSGGSACAVHGGGEEGLTACRCGRLLEVGVDRIRRRPPTPRASTGRRPHRFKHRPPPPPLRSGDAGSSLLEVGGRQIRHWTAFSSSVPKRPPPRASHLLLHPRAATAIASSTIPKY

SEQ ID NO: 303 - DNA, 1358 bp, Oryza sativa
atggacgacagctgcgcggtgtgcgcggacgcgctggagtgggtggcctacggggcctgcggccaccgcgaggtttgctcgacctgcgtcgttcgcctccgcttcgtgatgggcgacaagcactgctgcatctgcaagaccgagtgctcctccgtattcgtcaccaaggctatgggcgattacacaaaagtgataaatgatttcaatattttcccccctgtggcaactgagggaaaggtgggggagtactggtaccatgaggatagccaggcattttttgacgatgctgagcactacaagatgatacgagcaatgtgtcggctttcttgtagtgtgtgtgacaaagctgaagatcaggctggccaggcagcacaagtaaggcgcaaaagcaagttcaggagcattgaacagctgaagggacatttgttccatcaacataggttatacatgtgcagtctttgcttggaggggagaaagttcatttgtgaacagaagctttatacaaggacacagttaaatcagcatgtaaaaactggtgactctgaggtggatggctctgaggttgagcgcagtggttttgcaggacatcctatgtgcgagttctgcagaagttcattttatggagataacgagctttacacacatatgtcccgagaacactattcatgtcacatatgtcaaaggtatcatcatcctgggcagtatgattatttccggaattatgatgacttggagcatttccgtaaagatcatttcctctgtgaagatgaagcatgtttggcgaagaagtttgtagtcttccagagcgaagcagagctcaagctccagagacataatgctatggagcatggtgggcggatgtctcgtgctcagaggaatgccgcacttcaggatgttcgtgctgccaataagaccctggttgaaagaatgcgcagtgctttaggcatggatgaagataggtactctgcatttaaagaaatcgctggtgaataccgtcaaggcatcattggtacttcagaatatctttcatatgttgagcaatttggtctgtcacaccttgtgcctgaaatggctaggctgttacctgatcctcagaagcagaaagaacttgctgatctagcagatagcttcctggacactgtaaggaagcttcagttgaaacaagtacttcaggaaggagaggctgaggtgctgtcaagggatgggtatcgatcttccaagggaaaggcccaactaataactggagcaatcaaagaagacatcaaagtttctcagagcccgattaggggttgcctatgcgaggtgtttggaaaaatggagggggccagaagctctttacgggcaatggaaggaagtaa

SEQ ID NO: 304 - protein, 63 aa, Oryza sativa
  misc_feature (36)..(36): Xaa = any naturally occuring amino acid
WTTAARCARTRWSGWPTGPAATARFARPASFASASXWATSTAASARPSAPPYSSPRLWAITQK

SEQ ID NO: 305 - DNA, 768 bp, Oryza sativa
atggagcaaactttggacgtacctagatcgttgaggctaccgacaccaaaggctcaacaacaaatggatgaattttggagggatcgacaaaaagagattgagacaacaaaggactttagcgagcatgcgatccctatggcccgcttgaagaagatcgcatcttctcaaaagggtaacatgatgatgtcctttgacatgccagcattcttatcgaagatgtgtgagctcttcgtacaagaacttgctgtgcgtgcatgggcatctgctcaatcccataaccgttgcatcatactagacacggatattgctgaagccattgcctccacagagtcttatgactttcttgttgatatcctccataatcaccccatccctattactcctagtttaatgccaccaatttctcactatataccgttccaatatccatccttatcacaagaagtgtccacgatgatggcttccgcacccatagtgaatagatcaatgttgctcattcacaacatagcaaggggtctaggcttacaaggaaacaatatcagcacattcgccaacaataatatcccagacaatattattggttgtagtagccccgcggttcttgcaagtatgatgagtcctgctttactagacgttgcaggggcatcactaaatccgccaaactcttactccatctgcacgatgaacatgatcaactcgagtgatcccagtggatctagcattggtgacattaaatgtggcaaatcaggcaagtctggctccctctga

SEQ ID NO: 306 - protein, 255 aa, Oryza sativa
MEQTLDVPRSLRLPTPKAQQQMDEFWRDRQKEIETTKDFSEHAIPMARLKKIASSQKGNMMMSFDMPAFLSKMCELFVQELAVRAWASAQSHNRCIILDTDIAEAIASTESYDFLVDILHNHPIPITPSLMPPISHYIPFQYPSLSQEVSTMMASAPIVNRSMLLIHNIARGLGLQGNNISTFANNNIPDNIIGCSSPAVLASMMSPALLDVAGASLNPPNSYSICTMNMINSSDPSGSSIGDIKCGKSGKSGSL

SEQ ID NO: 307 - DNA, 706 bp, Oryza sativa
  misc_feature (45)..(45): k = guanine or thymine
  misc_feature (118)..(118): s = guanine or cytosine
atgccgacgccggcgctgcccctcgtcggcggttacaggccgatktcgccgctcccggcgccggatttcgccgccgcgccgcgaacggcggaggaggtctggaaggagataactggtscgggcgttgccgccgccgccggcggcttgttgccccctgctgctgctgctgctgctgccccggccgtcgtcgctggcgctggcgctggcaccgggcgcggagatacgctggaaggactttctggcgagggagggcgcggtgaaggaagacgaggctgtggtcaccgatccctcggcggccaaggggcaggtggtgatggggttcctgaacggggcagaggtcaccggaggcgtcaccggcggcaggagcaggaagaggcacctgatggatccgatggaccgcgccgcgatgcagcggcagaagcgaatgatcaaaaatcgcgagtcggcggcgaggtcacgggagaggaagcagaaggcctatattgctgagctcgagtcgctggtcacgcaactcgaggaggagaacgccaagatgttcaaagaacagcaggaggagcaacatcagaaacgacttaaagagagctcaaggaaatggttgttccagtcatcattaggaaaacgtcagcacgagatcttagaagaacaaactcgatggagtggtagacgtgagccaagctcagttgccatccccatacagtttatgtag

SEQ ID NO: 308 - protein, 220 aa, Oryza sativa
  misc_feature (40)..(40): Xaa = any naturally occuring amino acid
MPTPALPLVGGYRPISPLPAPDFAAAPRTAEEVWKEITGXGVAAAAGGLLPPAAAAAAAPAVVAGAGAGTGAEIRWKDFLAREGAVKEDEAVVTDPSAAKGQVVMGFLNGAEVTGGVTGGRSRKRHLMDPMDRAAMQRQKRMIKNRESAARSRERKQKAYIAELESLVTQLEEENAKMFKEQQEEQHQKRLKESLKEMVVPVIIRKTSARDLRRTNSMEW

SEQ ID NO: 309 - DNA, 753 bp, Oryza sativa
atgacaccgcagctagcattttctcgcatgcctccagggtttcggttccagccgacggacgagcagcttgtcgtcgactacttgcagaggcgtaccgctgcgcagccatgcgttactcccgacatcaccgatatcgacgtttacaacgtcgacccgtggcagcttccagccatggcgatgtatggatcggatcatgaccggtacttcttcacgatggcggcccgagaggcgcaggccagacgaacgacaccgtcgggtttctggaagcccaccggcacaaagaagacgatcttcgtcgtcgccggtgggcatgaggtgcccaccgccgtcaagaggaggttcgtcttctacctcggccaccaccaaccatcgggcagcaacaacaacaacaaaacatcatggatcatgcatgagtaccgtctcatgaactctccaagagcggcagtgccgtcgtcttcttcggtgaatcgtcttcccactgatgatctcacggaagagatggtgctgtgtaggatctccaacaaggacctgcctaaaccacccttcatccacaacagcttgttgcagttctcttcagtggggttgaatggtgatgggtataattacttgatccttgatcaccttgagcctccagcaatggagtatcctaatgttggcattggtaatgttgatgatgctgctgctggtactgatgatccgggtgaccttgatgaggagattgatgatagcatgcaaagaaaccatggtggctag

SEQ ID NO: 310 - protein, 250 aa, Oryza sativa
MTPQLAFSRMPPGFRFQPTDEQLVVDYLQRRTAAQPCVTPDITDIDVYNVDPWQLPAMAMYGSDHDRYFFTMAAREAQARRTTPSGFWKPTGTKKTIFVVAGGHEVPTAVKRRFVFYLGHHQPSGSNNNNKTSWIMHEYRLMNSPRAAVPSSSSVNRLPTDDLTEEMVLCRISNKDLPKPPFIHNSLLQFSSVGLNGDGYNYLILDHLEPPAMEYPNVGIGNVDDAAAGTDDPGDLDEEIDDSMQRNHGG

SEQ ID NO: 311 - DNA, 834 bp, Oryza sativa
  misc_feature (151)..(151): k = guanine or thymine
atggggaggacgccgtgctgcgacagggaggcggtgaagaggggcccgtggtcgccggaggaggacgacgcgctgcgcgactacatcaaccgccacggcaccgccggcaactggatctccctccccaacaaggccgagggtttaggaggtkcggcaagagctgcaggctgcggtggctcaactacctccgccccgacatccgccatggcgccttcaccgacgaggaggacgccatcatcacctccctctactccaagctcggcagcaatccaggtggtcgaccatcgcggcgcagctggagaggaggacggacaacgacgtcaagaaccactggaacaccaagctcaagcgccgcctcgccgccgccgccgcctgcacgcccttactgccgctcccggcgccgccgcccctcgccgccacgcacacgtcgccgtcgtcgtcgctgctgctcctcccgccgctcgccgtaccgaccgtcaagaccgaggcgtacacctgcgacgacttcctgcagcagctgctgccgaccgccaccgccgccacggcgctccgggatcccttcgccgacggcgccgccacggacggcggctcgacgtccgcctccgccgcgtcgtcggggtccaactggtcggcggacaccggcgtcgtcgtcgtcggtggcggcggcggcggcgggctgttcccggaattctgcatgagctccgacgacctcgccggcgccgccacggcggaggacgaccacttcatcggcggcggctactactaccctctcgatccgagcttgtcatcatcactagtgtagtgaactcgtgcgtttcaaagatcaaacactag

SEQ ID NO: 312 - protein, 267 aa, Oryza sativa
  misc_feature (46)..(46): Xaa = any naturally occuring amino acid
  misc_feature (51)..(51): Xaa = any naturally occuring amino acid
  misc_feature (90)..(90): Xaa = any naturally occuring amino acid
MGRTPCCDREAVKRGPWSPEEDDALRDYINRHGTAGNWISLPNKAXGFRRXGKSCRLRWLNYLRPDIRHGAFTDEEDAIITSLYSKLGSXSRWSTIAAQLERRTDNDVKNHWNTKLKRRLAAAAACTPLLPLPAPPPLAATHTSPSSSLLLLPPLAVPTVKTEAYTCDDFLQQLLPTATAATALRDPFADGAATDGGSTSASAASSGSNWSADTGVVVVGGGGGGGLFPEFCMSSDDLAGAATAEDDHFIGGGYYYPLDPSLSSSLV

SEQ ID NO: 313 - DNA, 1695 bp, Oryza sativa
atgcaccatgtgactgaagggtgtcagttgcagccaattaatgttgagaatggcaacaatggaaatgccactaggaccgagaagcacctaggctggtcaactgaagaagacttgaggctggagatcccacgtccaatgggagtcaaggcagctaaggcgcagcgtataggcaaaggaaaaggcaaggttcaagattgtactgctgagctagaagatgacatccacaagtttatggatgcacatgaagcagccaaggagcagcaaagtgaattgttggagacccagcgacgtgttgctagtgataatcttgaagcgaagaaggttggttaccagaccgctatgattgcagcatataaagagttactgaacaaagacacaagagatatgcctgatgatatgaccctagacccatctaaagttctagacaagtacatttctgagcagaatgtactaggctcatttgcttctcgaatcatagagaagatgaagggtaggtttggagctgggcgtttgaagcgccaaggtggaacaattaagacaattcgtagggatcatgtagatgcccacagccgtttggtggctgattattttgcagaacatccgttgtacccagagcggatgtttcgcacaaggttccgcatgcataagccactctttttacgtattgttgaagccttaagtcagtggtcaccgtactttactcaaaggggagattgctctggtcacaccagcctctctccacttcaaaagtgcacagcagcacttcgtatgttagcatatggcacacctgctgatgcactagatgaatatttaaaaattggcaagagcacagccttagaatgcttagaaatgttttcacgaggggtgattgtggtctttggtgggacgtacttgagacgccccacaagggaggatgtagagcatatattacatgttaacgagtctcgtggatttccgggtatgctaggtagtattgattgtatgcactggaggtgggaaagttgtccgagggcttggaggggtcaattcacccgtggtgattacaaagtcccaacaattatcctcgaagcagttgcttcacacgacctatggatttggcatgccttctttggtgtcgctggttctaacaacgacatcaacgtgctgaatcagtcccctcttttccttgacacagtaagaggtgaggctcctcgggtccattattatgtcaatggggaagagtacaaccatgggtattacctagatgatggtatataccctgaatgggctgtattccagaagactataccacttccacaaatagagaagcataagttatatgctgaacatcaagagggggcgaggaaagatgtggagcgggctttcggggtattgcaagctcgtttcaacattgtacgtcgttcagcaaagaaatggaagagaaagagtattggaaataccatgctagcttgcgtgattctccacaatatgattgttgaagacgagggcgaggatgcaatatgtgacctagacctcaatagaattcctaggacatcaatagtactgcctccagaagtaaccagtggtggtaacccatgttttcgtgatgtgctaagtaggaaagctgctattcgtgctcgttcgatgcatacccagcttaaaactgatttaattgagcacatttggaaccggttccggaatatgcagcgtgcataa

SEQ ID NO: 314 - protein, 564 aa, Oryza sativa
MHHVTEGCQLQPINVENGNNGNATRTEKHLGWSTEEDLRLEIPRPMGVKAAKAQRIGKGKGKVQDCTAELEDDIHKFMDAHEAAKEQQSELLETQRRVASDNLEAKKVGYQTAMIAAYKELLNKDTRDMPDDMTLDPSKVLDKYISEQNVLGSFASRIIEKMKGRFGAGRLKRQGGTIKTIRRDHVDAHSRLVADYFAEHPLYPERMFRTRFRMHKPLFLRIVEALSQWSPYFTQRGDCSGHTSLSPLQKCTAALRMLAYGTPADALDEYLKIGKSTALECLEMFSRGVIVVFGGTYLRRPTREDVEHILHVNESRGFPGMLGSIDCMHWRWESCPRAWRGQFTRGDYKVPTIILEAVASHDLWIWHAFFGVAGSNNDINVLNQSPLFLDTVRGEAPRVHYYVNGEEYNHGYYLDDGIYPEWAVFQKTIPLPQIEKHKLYAEHQEGARKDVERAFGVLQARFNIVRRSAKKWKRKSIGNTMLACVILHNMIVEDEGEDAICDLDLNRIPRTSIVLPPEVTSGGNPCFRDVLSRKAAIRARSMHTQLKTDLIEHIWNRFRNMQRA

SEQ ID NO: 315 - DNA, 1119 bp, Oryza sativa
  misc_feature (648)..(648): k = guanine or thymine
atggggcgggtgccgtgctgcgagaaggacaacgtgaagcgcgggcagtggacgcccgaggaggacaacaagctgctctcctacatcacccagtacggcacccgcaactggcgcctcatccccaagaacgccgggttgcagcggtgcgggaagagctgccggctgcggtggaccaactacctccggcccgacctcaagcacggcgagttcaccgacgccgaggagcagaccatcatcaagctccactccgtcgtcggcaacaggtggtcggtgatcgcggcgcagcttccggggcggacggacaacgacgtgaagaaccactggaacacgaagctgaagaagaagctgtccgggatgggcatcgaccccgtcacgcacaagtccttctcgcacctcatggccgagatcgccaccacgctggcgccgccgcaggtggcgcacctcgccgaggccgcgctggggtgcttcaaggacgagatgctccacctcctcaccaagaagcgcccctccgacttcccctcgcccgccgtgcacgacggcgccggcgccggcgccagcgcgtccgcgctcgccgcgccctgtttccccgccgcgccgccgcaccacccgcaggccgacgacaccatcgagcgcatcaagctcggcctktcccgcgccatcatgagcgatccctccaccgcctccgccgccgccgccgccgccgcgccctccgcccccgcggaggacaagccgtggccgcccggcgacatgtccgaggggctcgccgggatgtacgccacgtacaacccggcggcgcacgcgcacgcgcaggcccaggccgagttccggtacgacggggcctccgcggcgcagggctacgtcctcggcggcgacggcgaccagggcacgtcgatgtggagccaccagagcctgtacagcgggagctccggcaccgaggaggccaggcgggagttgccggagaagggcaacgacagcgtcggcagcagcggcggcgacgacgacgccgcggacgacggcaaggacagcgggaagggggcagcctccgacatgtcgggcctgttcgcctccgactgcgtgctctgggacttgcccgacgagctcacgaatcacatggtgtag

SEQ ID NO: 316 - protein, 372 aa, Oryza sativa
MGRVPCCEKDNVKRGQWTPEEDNKLLSYITQYGTRNWRLIPKNAGLQRCGKSCRLRWTNYLRPDLKHGEFTDAEEQTIIKLHSVVGNRWSVIAAQLPGRTDNDVKNHWNTKLKKKLSGMGIDPVTHKSFSHLMAEIATTLAPPQVAHLAEAALGCFKDEMLHLLTKKRPSDFPSPAVHDGAGAGASASALAAPCFPAAPPHHPQADDTIERIKLGLSRAIMSDPSTASAAAAAAAPSAPAEDKPWPPGDMSEGLAGMYATYNPAAHAHAQAQAEFRYDGASAAQGYVLGGDGDQGTSMWSHQSLYSGSSGTEEARRELPEKGNDSVGSSGGDDDAADDGKDSGKGAASDMSGLFASDCVLWDLPDELTNHMV

SEQ ID NO: 317 - DNA, 2394 bp, Oryza sativa
  misc_feature (223)..(223): r = adenine or guanine
  misc_feature (824)..(824): k = guanine or thymine
  misc_feature (825)..(825): s = guanine or cytosine
  misc_feature (828)..(828): w = adenine or thymine
atgacaagcgataacggaaaggctccagataaggatggagagccttctggacctccgtcggctcctcaagaaggagaaatcagcaatgaaccaaaaaggcgacgacctctcaatggggaggaccaccggtccgacacggcgttccaccaaaggaaattggacccctgaagagaggatgccatattgtccagagctgttcagacatacaacgggaagaactggraaaaaatagagcggaatgctttccggatagaaccgatgtacaatgcttgcacaggtggcaaaaggttctaaaccctgaattagtcaaagggccatggtccaaagaagaagatgaaatcattgttcagatggtaaacaaacttggaccaaagaaatggtcaaccattgctcaagctttgcctggacgtataggaaagcaatgtcgagaacgggtggtacaaccatcttaaccctggcataaacaaggaggcatggacacaagaagaggaaattaccctcatacatgctcatcgaatgtatggaaataaatgggccgagctgacaaaatttttaccaggaagaggacggacaattcaattaaaaatcactggaacagttcagtaaagaagaaagtcaattcatacatgtcatcaggtttacttacccaagtttcgtgtctccctctaaatgaatattctgcaaattgtaattcctcaccagcgatgacccaacaaaacagtgaagatagtggttgttttgctgtccgagaggttgaaaattcatcagggtgtagtcatcatcacttgccaaggttcttgctcccaagtgcatgatactattgksccwttgggctgtgatttgcaagtaaacgcgaattttgacaagaatgaagcacatgattctcaatcttccatgggtccccaagcatgctatacttctgcggaggctgttgcatctgctttgcctgctgtgcattgccatgtttcttcctctaacttggatccagatcaacacttgcaagaggactttgctcaaggactgaatttggacatgactatagatgaaatgccaactgttcctagttttgcagacaaccagactgtttgtagtatagaaaatcatgaaagatctctggagccatatgatgtagcaatggaggtgcctctctctatgttatcaagtgattctggagctgagcaaaaactacatttcatgtctgaggctgacttcaacagtcctaactgtctgaaatctgaactctggcaggatatttccttacagggccttctttctggacctgatgcagttgaagctgattcaatttcaagatcaaatcaccaatcggatgtatattcctctgaagcagatacccattttttagcaccaccctacatgccacagacatcaaattcttcaagtgtgatggggcttgctgatgaccagagtccacagatgtcagtacctccatctcttatttgttcaaatgctatgactgatgatgcacctttcgataatagaccagggcggaaggaaatgccactttctcaggcagaagtggttacccaatcttccagttcttctggtgatgctgaaatgtttgctaaccctggttgtagcaatgacagacatgttccttcttcaacgatggaaagcatacctgaatgtggggaccaacaggttactaatgcggaagaacctgaagccagtctagagaaagaaccatcgcttacacagagtgtgactgcaccagatgaacaggacaagggagccctcttctacgaacctcctcgttttccaagcctggatgttccatttgtcagttgcgatcttgtaacctctggtgatctccaagagtttagtccccttggcattcggcagttaatgcattcaaccatgaatgtctgcacgccaatgagattgtggggctcccctactcatgatgaaagcacgggcgttttgctgaagagtgctgccaaaagcttcatatgcacgccatcaatactgaagaaacgtcacagagatctcttgtctcctattccagataaaagaatcgagaagaaatatgggactgaaaaggatcgtggggtatcagacacatcctccaccggcattcaaacaagttgtatcaatgccactaaagatgatgcacttataactacagttttgcgtattgagcgatctgcttcttctaaatctctggaaaagaaacttgttttctctgatgaaaacaaggaaaatttgggctacacaactgaacagacaaaagatggacagagtgctggaaatgacgaacacatggacgagcagacaacaggggaacgcagttctgcaacaaatgtagctactaatgatgacctgtcaggcaatttagtaagtacttccagtttctgatgatatttagcttgtcagtag

SEQ ID NO: 318 - protein, 271 aa, Oryza sativa
  misc_feature (1)..(1): Xaa = any naturally occuring amino acid
  misc_feature (57)..(57): Xaa = any naturally occuring amino acid
  misc_feature (75)..(75): Xaa = any naturally occuring amino acid
  misc_feature (188)..(188): Xaa = any naturally occuring amino acid
XQAITERLQIRMESLLDLRRLLKKEKSAMNQKGDDLSMGRTTGPTRRSTKGNWTPEXEDAILSRAVQTYNGKNWXKKIAECFPDRTDVQCLHRWQKVLNPELVKGPWSKEEDEIIVQMVNKLGPKKWSTIAQALPGRIGKQCRERWYNHLNPGINKEAWTQEEEITLIHAHRMYGNKWAELTKFLPGXRTDNSIKNHWNSSVKKKVNSYMSSGLLTQVSCLPLNEYSANCNSSPAMTQQNSEDSGCFAVREVENSSGCSHHHLPRFLLPSA

SEQ ID NO: 319 - DNA, 559 bp, Oryza sativa
atgagcgcgacgcccaatccgatcgatgcctccgtcgtctccgccgccgccgccgtcgcgggcggcgggggaggtggggatgggggaaggggaggaggagggaaggagaaggagaagcaggtgggtggctgcgccgctgcagccgccgatggccgtgcctgcaccggcggcggcggttggggaggaggcgaggaaggtgaggaagccgtacaccatcaccaagtcgagggagagctggacggagcccgagcacgacaagttcctcgaggcgctgcagctttcgatcgtgattggaaaaagattgaagcatacgttggctcaaaaactgtgatacagcagataaggagccatgcacaaaaatactttttgaaggttcagaaaaatggtacaggtgaacatctgcctccacccaggccaaagcggaaggcagctcatccatatccacagaaggcctctaaaaatggtactactgctgatgagaaatctgtccatgaacttaactagccccaactttgcggcacatgtaagttgttctgtttttgtatttgttctccactga

SEQ ID NO: 320 - protein, 186 aa, Oryza sativa
  misc_feature (1)..(186): Xaa = any naturally occuring amino acid
MSATPNPIDASVVSAAAAVAGGGGGGDGGRGGGGKEKEKQVGGCAAAAADGRACTGGGGWGGGEEGEEAVHHHQVEGELDGARARQVPRGAAAFDRDWKKIEAYVGSKTVIQQIRSHAQKYFLKVQKNGTGEHLPPPRPKRKAAHPYPQKASKNGTTADEKSVHELNXPQLCGTCKLFCFCICSPL

SEQ ID NO: 321 - DNA, 804 bp, Oryza sativa
atggggatgtgtagcaagacaaggaagaaggggtcgtggagggcggaagaggacgcgctgctgacgaggctggtggcgcagcatggcccccaccggtggagcatcatcagcggcgccatcccggggcgctccggcaagtcgtgccggctgcggtggtgcaaccagctgagcccggccgtgcagcaccgccccttcaccccgcaagaggatgccctcctcgccgccgcccatgcccgccacgggaacaagtgggccaccatcgcccgcctcctccccggccgcaccgacaactccgtcaagaaccactggaactccaacctccggaggtgcctccgccgccaagccaaattcaaatccaaggaccctgatctgctgcccgatccaattaatattccacctgactgcatcgtcgtgctcaacgacgacgacgagcctgcagatcggccggtcacgccgcccgccatcatccaggcccaggcccaggagacactaccgtcgctgaccctgagccttagcctttccctgcccggcgccgctgctgctgctgctgaggttgaggtggcaccgccgccgcccagggcactggcagctgcttctgagatccaagacggcagcagcagatcatcatcggcatcgcgtgtcatgttgcaggtgatgcgacagatggtgagggaagaggtgcagcgccatactgcgcagctcgcctactccctcatggccctggcctcctgcagccgtaggcccccaaatttaggagcattcattttcagactttgttcaaacatcgatcgatcatcaaattaa

SEQ ID NO: 322 - protein, 267 aa, Oryza sativa
MGMCSKTRKKGSWRAEEDALLTRLVAQHGPHRWSIISGAIPGRSGKSCRLRWCNQLSPAVQHRPFTPQEDALLAAAHARHGNKWATIARLLPGRTDNSVKNHWNSNLRRCLRRQAKFKSKDPDLLPDPINIPPDCIVVLNDDDEPADRPVTPPAIIQAQAQETLPSLTLSLSLSLPGAAAAAAEVEVAPPPPRALAAASEIQDGSSRSSSASRVMLQVMRQMVREEVQRHTAQLAYSLMALASCSRRPPNLGAFIFRLCSNIDRSSN

SEQ ID NO: 323 - DNA, 882 bp, Oryza sativa
atgagtttcataggcatggtggaggcgagaatgccgccggggttcaggttccacccgagggacgacgagctggtgctggactacctcctgcacaagcttgccgccggcggccggggaggaggggtgtacggcggcggcggcggcgtcgccatcgtcgacgtcgacctcaacaagtgcgagccatgggaccttccagacgcggcgtgcgtgggaggcaaggagtggtacttcttcagcctccgcgaccgcaagtacgccaccggccaccgcaccaaccgcgccacccgctccggctactggaaggccaccggcaaggaccgctccatcacccgccgctcctccatctcctccggcgagccctcctcctccgccgccgccgccgccgtcggcatgcgcaagacgctcgtcttctaccgcggccgcgcccccaagggccgcaagaccgagtgggtcatgcacgagttccggctcgaaccgcagcctttccacctcaaggaggactgggtgctatgcagggtgttctacaagaccagacaaacaattccaagcccatcatctgaagaggccgtcacactgcccaatgagctagacctgcctgccacgccttcgctcccgcccctcatcgatgcctacatcgccttcgatagcgcaccgacgacgacgccatcgatggtcgggagctacgagcaagtgtcctgcttctccggcctgccggcattgccaatgaagggctccatcagctttggggacctgctggccatggacacctctgcagagaagaaggccatcagggtactgcacaacagcaacactgcaaagctggagctctccccagattggggacaggagagtggcctgtcacagatgtggaacccccaataa

SEQ ID NO: 324 - protein, 293 aa, Oryza sativa
MSFIGMVEARMPPGFRFHPRDDELVLDYLLHKLAAGGRGGGVYGGGGGVAIVDVDLNKCEPWDLPDAACVGGKEWYFFSLRDRKYATGHRTNRATRSGYWKATGKDRSITRRSSISSGEPSSSAAAAAVGMRKTLVFYRGRAPKGRKTEWVMHEFRLEPQPFHLKEDWVLCRVFYKTRQTIPSPSSEEAVTLPNELDLPATPSLPPLIDAYIAFDSAPTTTPSMVGSYEQVSCFSGLPALPMKGSISFGDLLAMDTSAEKKAIRVLHNSNTAKLELSPDWGQESGLSQMWNPQ

SEQ ID NO: 325 - DNA, 1860 bp, Oryza sativa
  misc_feature (1035)..(1035): k = guanine or thymine
atgggcaatccttctattctcacggaggatttaggcgatacgtctgactttgaggttgatggcgtcgagaacctcacggagaatgatgtcagtgatgaggagattgatgccgaggagctggcccgacggatgtggaaagacaagatcaagctgaagaggatcaaggagaggcagcagaagcttgctctgcagcaggcagcactagaggagtccaaaacaaagaagatgtctgagcaggctctccgcaagaagacggcgagagtccaggatgggatcttgaggtacatgctcaagctgatggaggtgtgcaatgctcgtgggtttgtttatgggatcattcctcataaagggaagcctgtcagtggtgcatcggataacattagagcttggtggaaggagaaggttcggttcgatgtgaatgggccggttgccattgcaaagtatgaggttaagaactcaatgctggttgatgctaagcgcagaggggtcttgaaccagcatagcttgatggatctccaggatgctaccctgggatcattgctctcatcgttgatgcagcattgcagcccgcagcagcgcaagtacccactggataagggtgtccctcccccatggtggccatcaggaaatgaggattggtggatttctttaggccttccaatgggaatatcaccaccatacagaaaaccgcatgatcttaagaaggtttggaaggttggcgtgctgacgggtgtgatcaaacacatggccccaaactttgataagatcaggaattgtgtaaggaaatcgaagtgcttgcaagacaaaatgactgctaaagagagcttgatttggctgggagttcttcgaagagaggaaatatattttcgcagttctgacaatgttggatcacagattacacaccgtagttctcgtgagggaaaaagtgatgatatatatagcagcagtgatgagtatgatgtcgaccatttggaggaacctcctcgctcttcatcatccaaagataatgtggggcgtcgtcagccaactgcgcakatcagagaggagcatacctctagtcgacacaacagaggacgccatgatcagcaacccaatcaagtacttcctagcaatgaagggaccaatgaatcaaggaagagaaagagacctagtggtcatttacttactgctgaatctgaggttgaggtaacacaaaaagatgacaatcaactagccattgtgagcaatgcattgcccaatatgagcagaataaaccaaacggagatgatgggcatggctaaccagatgacaagcctcagccatgtcaatacaactgaaactctacagcatcaatatgttcaagggaacttcgtatcttctcctgctgctgtggttaataactataacagcaaccagattacaaatgttaatccttcaaggatttatatgggatatcagcctttagcatgccaaaataatggtcacacaaatccatggtctgaagacacttttcaggttgatgttggtccaccacctattggttttactactaattcttcgtcaggtggtaatcattcttttcccatgaaacaatcactaccaaaatctatagatgatcatgtgcctattacggagacaggggtgttggctgatagcagttcatatggttatcatatcacagccacaggtagtaggaattcaacctctgttgctggccatggaaatcagctcatgggagatcctttcgacagtggtactgctgataagttcaatgggaattcgtttgatggattgccttttgacttcattggtagtagtccaatccctgacatcggtgtattgctagatgatgatgatataatgccatatctgggaacataa

SEQ ID NO: 326 - protein, 619 aa, Oryza sativa
  misc_feature (345)..(345): Xaa = any naturally occuring amino acid
MGNPSILTEDLGDTSDFEVDGVENLTENDVSDEEIDAEELARRMWKDKIKLKRIKERQQKLALQQAALEESKTKKMSEQALRKKTARVQDGILRYMLKLMEVCNARGFVYGIIPHKGKPVSGASDNIRAWWKEKVRFDVNGPVAIAKYEVKNSMLVDAKRRGVLNQHSLMDLQDATLGSLLSSLMQHCSPQQRKYPLDKGVPPPWWPSGNEDWWISLGLPMGISPPYRKPHDLKKVWKVGVLTGVIKHMAPNFDKIRNCVRKSKCLQDKMTAKESLIWLGVLRREEIYFRSSDNVGSQITHRSSREGKSDDIYSSSDEYDVDHLEEPPRSSSSKDNVGRRQPTAXIREEHTSSRHNRGRHDQQPNQVLPSNEGTNESRKRKRPSGHLLTAESEVEVTQKDDNQLAIVSNALPNMSRINQTEMMGMANQMTSLSHVNTTETLQHQYVQGNFVSSPAAVVNNYNSNQITNVNPSRIYMGYQPLACQNNGHTNPWSEDTFQVDVGPPPIGFTTNSSSGGNHSFPMKQSLPKSIDDHVPITETGVLADSSSYGYHITATGSRNSTSVAGHGNQLMGDPFDSGTADKFNGNSFDGLPFDFIGSSPIPDIGVLLDDDDIMPYLGT

SEQ ID NO: 327 - DNA, 879 bp, Oryza sativa
  misc_feature (508)..(508): y = cytosine or thymine
atggcgtcttgtcggagaggagggggaggggatgtggataggataaaggggccgtggagtccggaggaggacgaggcgctgcagcggctggtggggcggcacggggcgcgcaactggtcgctgataagcaagtccatcccggggaggtcggggaagtcgtgccggctgcggtggtgcaaccagctgtcgccgcaggtggagcaccggcccttcactcccgaggaggacgacaccatcctccgcgcccacgcccgcttcggcaacaagtgggccaccatcgccaggctcctcgccggccgcaccgacaacgccatcaagaaccactggaactccaccctcaagcgcaagcaccactcttctctccttgccgacgaacttcggccctttcaagcggacaaccagcgacggccacccgaagctctcctccgccgccggccccgggagcccctccggcacgtctaccgcccggtcgcgagggccggcggggtcgtcgtccctcctcctcctyccccggcgcctccggcgacctcgctctccctctctctctcccttcccggcctggatcacccacaccccgatccctccaccccgtcggagcctgcggtacagttgcagccgcctccaccgtctcagatgccgccaccaacaccatcttgtgtacgccaagagccgcctcagatgccgttccagctgcagcccccaccgccgccgcgcccatcggcgccgttcagcgcggagttcttggccatgatgcaggagatgatccggatcgaggtccggaattacatgtccggctccgccgccgtggatcctcggtcgtcgcccgacaacggcgtgcgcgccgccagccgcatcatgggcatggccaagatcgagtaa

SEQ ID NO: 328 - protein, 292 aa, Oryza sativa
  misc_feature (170)..(170): Xaa = any naturally occuring amino acid
MASCRRGGGGDVDRIKGPWSPEEDEALQRLVGRHGARNWSLISKSIPGRSGKSCRLRWCNQLSPQVEHRPFTPEEDDTILRAHARFGNKWATIARLLAGRTDNAIKNHWNSTLKRKHHSSLLADELRPFQADNQRRPPEALLRRRPREPLRHVYRPVARAGGVVVPPPPXPAPPATSLSLSLSLPGLDHPHPDPSTPSEPAVQLQPPPPSQMPPPTPSCVRQEPPQMPFQLQPPPPPRPSAPFSAEFLAMMQEMIRIEVRNYMSGSAAVDPRSSPDNGVRAASRIMGMAKIE

SEQ ID NO: 329 - DNA, 2316 bp, Oryza sativa
atggcagacatagtggaagggaggtggtggaggcattatgcaggagaatgtaggcaactttggcatcaaatgtgtctcctacacaataggtggcaacagggaaagagtctcaccggtacctggagtagcttcgatgttggtgagagagttccgaagtactttgatgatccaatacaggaaatttttctcgaagaaattatagaggatgtctactacatgacaaaagaacaatacgctaacaatgttgtgcagcacattttgcagcatgggaaagcccttgtgcgatctttaattataaagagatttattgggaaagttgtgaccatgagcaagcaaaagtacgcttctaatgtctttgaaaagtgcttggtcttcagtagctatgatgaaacccagaagattattaatgaggtcctaaccatagccaaggttatcttcttcgtcgagaattacttcaagggtggaataactaggcttaagaggcacttggctggagttagagggcagagtgtttattgcacacaagttcctgatgatgttaaggagaaggttaaagcaatgctggatgcacatggtgaaaagaagagtgcaaaattggatagccagcttcgattgaggcaacaggttaatatcaatggaaatgatgatgaggaaatggaagaagtaggagaagttgaagttcaagaagctccatcagctgcaggaagcacactagtccgtaagaagccccgaaacaagggaccattggacagctattgcatgcgccctgaggaacctcgtgctaagggaaagcatatacaaactacaatgagtaaacactgtaagtttgttgcaggaatatttggaagtgcaaaaggagtcatggtcttctactggatgttctattatcgcaaatgcttggaccagattcggcgtggaagaagcttaatgaatttggttgctcactgtgctagaggtatgtgtttcattgatgccattgatgcttccttggaggttcacgatgggaagtacatctacagcttggtggtcactgacaatgcttcaaataatatgtctgcatcaaagatgcttcaagtgaaacatcctcacatattctggacctcatgtgctgcccactatattgatctcatgctagaggatattggtaagataactatggtacataacattattcgagatggaaagtctatcacaaatttactctatgcacaagttagattgctggccattatgcgtcaatttacgaaaggtgacttagttcgagctggtactactcgatttgccactagttacttgaacttgaaaagtctttatgataaaagaaatgaattgaagcaattgtttgcatcacaagattgggctaaaagttcctgggctaaaaagattaaaggacagaatgcacacaacttggtcatgaacaacaagttctggtcacaaatgctagaggttataaattattttgagccacttgcatatgtacttaggagggtggatggtgatgttccagcaatgggatacatttatggtgatcttatcaaagcaaagaaggacgttgcagcatgcctaaatggaaatgagaagaaatatagtcatatttggaaaatcatagatgcaagatgggacagcaagctcaagactacattgcacaaagctgggtatttcttgaatccgtgcttcttctatgagaataagagagaaatcaaggaagatttcctgatgcaagcagttgtagaatgtgcaacctgcatgtatcgtgatgatattacagtgcaagatatttgtgtagctcagcttagcctgtacactgaagccatggattcttttggaacaacaatggctattagacaaagaaatagtccaacaatcaccccagtttcatttgcatgcgaaagaaattggagtgcatttgagagagtccattctaagaaaagaactagattaggccaccgaaaattgaatgctctggtctttgtcatgttcaacaagaggctgaaatcaaaatattctcaaaaggatagggatccattagttgctaaatttatagatgatgatccaccaaatgaatggattatagatgatgatgcacctgcacaacaaccagaagttgatgctcagagtgcagctgtcagtcgaaagagaagattaatacataaaaaatcatcaagtaaagcaaagaaagcatgcgttgtggtcgaagaggaggaggaagaatttcaatcttctaacagtgaacatgaagaggaggaaaatattccttatgcagatggttcaagtgaccatgagcttgatgacgttggtgagaatgacaacgaatga

SEQ ID NO: 330 - protein, 771 aa, Oryza sativa
MADIVEGRWWRHYAGECRQLWHQMCLLHNRWQQGKSLTGTWSSFDVGERVPKYFDDPIQEIFLEEIIEDVYYMTKEQYANNVVQHILQHGKALVRSLIIKRFIGKVVTMSKQKYASNVFEKCLVFSSYDETQKIINEVLTIAKVIFFVENYFKGGITRLKRHLAGVRGQSVYCTQVPDDVKEKVKAMLDAHGEKKSAKLDSQLRLRQQVNINGNDDEEMEEVGEVEVQEAPSAAGSTLVRKKPRNKGPLDSYCMRPEEPRAKGKHIQTTMSKHCKFVAGIFGSAKGVMVFYWMFYYRKCLDQIRRGRSLMNLVAHCARGMCFIDAIDASLEVHDGKYIYSLVVTDNASNNMSASKMLQVKHPHIFWTSCAAHYIDLMLEDIGKITMVHNIIRDGKSITNLLYAQVRLLAIMRQFTKGDLVRAGTTRFATSYLNLKSLYDKRNELKQLFASQDWAKSSWAKKIKGQNAHNLVMNNKFWSQMLEVINYFEPLAYVLRRVDGDVPAMGYIYGDLIKAKKDVAACLNGNEKKYSHIWKIIDARWDSKLKTTLHKAGYFLNPCFFYENKREIKEDFLMQAVVECATCMYRDDITVQDICVAQLSLYTEAMDSFGTTMAIRQRNSPTITPVSFACERNWSAFERVHSKKRTRLGHRKLNALVFVMFNKRLKSKYSQKDRDPLVAKFIDDDPPNEWIIDDDAPAQQPEVDAQSAAVSRKRRLIHKKSSSKAKKACVVVEEEEEEFQSSNSEHEEEENIPYADGSSDHELDDVGENDNE

SEQ ID NO: 331 - DNA, 486 bp, Oryza sativa
  misc_feature (119)..(119): s = guanine or cytosine
atgacggcggcggcggcggtgccgaacgcgctgatgagcagatgctggggatggaggcactatggcagacgctgggggacacactggcatcggcggcctacgcggcggcagtggcggcsggggctgagcggtggcggtgggggtggcctccgatctcccctggcctcaaccgccgggggagaagctgcgcacgggcggcagccgccgagggcgtcgcggctccgatcctcaagcgccctcatggcgtcgccatcgtcaccgcgttcctcctgcctcgccgccaccgccgacgcgggagttgaacttgtccccctcctaatgtactcgccacaggcgacgcagttctgccagccgttcttatgctgccaccaccgccaagccgacgccgacgccagcggcggccgctgggaggcgttggccgagctggaggaggacaacgagatggtgtgtggtgctggaggactcctctcgcgccatttgccatag

SEQ ID NO: 332 - protein, 161 aa, Oryza sativa
MTAAAAVPNALMSRCWGWRHYGRRWGTHWHRRPTRRQWRPGLSGGGGGGLRSPLASTAGGEAAHGRQPPRASRLRSSSALMASPSSPRSSCLAATADAGVELVPLLMYSPQATQFCQPFLCCHHRQADADASGGRWEALAELEEDNEMVCGAGGLLSRHLP

SEQ ID NO: 333 - DNA, 1264 bp, Oryza sativa
  misc_feature (1202)..(1202): k = guanine or thymine
  misc_feature (1229)..(1229): k = guanine or thymine
  misc_feature (1239)..(1239): w = adenine or thymine
atggctgacgaggatattcaacctattgtgtgcgacaatggcactggaatggtcaaggcaggttttgctggtgatgatgcaccaagggccgtcttccctagcattgtagggagaccacgtcacaccggtgtcatggttgggatgggccaaaaggatgcctatgtgggtgatgaagctcaggcaaaaaggggtatcctgactctaaagtacccaattgaacatggaattgtcaataactgggatgacatggagaaaatatggcaccacaccttctacaatgagcttcgtgttgcacctgaagatcaccctgtattactaactgaagcccctctcaatcccaaagccaacagagagaagatgacacagatcatgtttgagaccttcaattgcccagcaatgtatgtcgcaatccaggctgttctatccttgtatgctagcggtcgaacaactgggtatcgtgcttgactctggtgatggtgtgagccacactgttccaatatatgaaggatatacgcttcctcatgctatcctccggttggatcttgctggccgagacctcactgaccatctcatgaagattctcacagagagagggtattccctcacaacaagcgctgagcgggaaattgtcagagacataaaggagaagctcgcttatgtcgcccttgattatgagcaggagctggaaacttctaggagcagctcctctgttgagaaaagctatgagatgcctgatggccaagtaattaccattgggtcagaaaggttcaggtgccctgaggttctgttccagccatctcttgttggtatggaatctcctggcatacatgaagctacatacaactccatcatgaagtgtgatgtagatataaggaaggacctgtatggcaatgttgtcctaagtggagggtctaccatgtttcctggaattgctgatcgtatgagcaaggagatcacttcccttgctcctagcagtatgaaggttaaagtgattgcaccaccagaaagaaaatacagcgtctggattggtggttctattttggcttctcttagcactttccagcagacatttgtttcacagatgtggatctccaagggcgagtatgatgaatctggtcctggcattgtccatatgaagtgcttctgagcttcttgccaagtttgtagagcggtatttcaagatgtccagaatctcagttggkttaaggataccaggagacctggctttkgcagattaawtatatacttgtactctgatagttga

SEQ ID NO: 334 - protein, 381 aa, Oryza sativa
MADEDIQPIVCDNGTGMVKAGFAGDDAPRAVFPSIVGRPRHTGVMVGMGQKDAYVGDEAQAKRGILTLKYPIEHGIVNNWDDMEKIWHHTFYNELRVAPEDHPVLLTEAPLNPKANREKMTQIMFETFNCPAMYVAIQAVLSLYASGRTTGIVLDSGDGVSHTVPIYEGYTLPHAILRLDLAGRDLTDHLMKILTERGYSLTTSAEREIVRDIKEKLAYVALDYEQELETSRSSSSVEKSYEMPDGQVITIGSERFRCPEVLFQPSLVGMESPGIHEATYNSIMKCDVDIRKDLYGNVVLSGGSTMFPGIADRMSKEITSLAPSSMKVKVIAPPERKYSVWIGGSILASLSTFQQTFVSQMWISKGEYDESGPGIVHMKCF

SEQ ID NO: 335 - DNA, 1168 bp, Oryza sativa
atggatggggttgtcgccgcttcggctgatgccaccagggacgagattaagattatgaatgtgtacatatgggacatggatgaaaccctcattctgctcaagtcgctgctggatggctcgtatgctggtgcctttgatggcctcaaggaccatgataagagtgttgatatagggaagaggtgggagaatctcattctggaactctgtgacgagcatttcttctatgaggaggtcagctccactccactactatctgctggctacttgccatcagattgagaattacaatgaaccctttctcagtgctgtcaaagaatatgatgatgggaaagacttgacaacatatgattttgaagctgactgctttagttcgccttatgatgatctgaataaaaggaagcttgcttacaggcaccgtgctattggagagaagtatacaaagagggtttggaaaaaattctggaccaccacatgatcaaagtctggaatgatctgtatagcgcgaccgacaaatacaccgatggttggctttcttcagagcacttatgtggcataatcagatgcttatgtggtataatcgggtgcttatgcggcttaagctgtacaaggttggggcatccgttccttgtatgcggccttctcataagttgttggaagaagcaatgggtaaatcaacagctgagtccactgccaaacattcaagcatcaattgcatagttacatcagggtccctgattccaagtcttgccaaatgtttgctctatcgtctggatgatgtggttgcattcgagaatggtttacagctcctgggaagtcgggaaactgcagtgcttcaaatggatcaaggagcgctatgatggcccaaacgtccgtttctgtgcaatcggagacggacacgaagaatgcaccgctgcgcagataatgaagtggccatttgtcaagatcgagttccaccctgatgcccctcataggttccctggcctgaaccttccaaccattcatcgcatcatggataccgtttatgattcatcgagcaacgatggtcctccgatgccggcatttgccaattgccgtggagaccttgttaaaggaaattgtaagcagagagatgcgatgggaaggcatattgctgaccctctgcctggagaattaggaggctggtgtgtga

SEQ ID NO: 336 - protein, 383 aa, Oryza sativa
MDGVVAASADATRDEIKIMNVYIWDMDETLILLKSLLDGSYAGAFDGLKDHDKSVDIGKRWENLILELCDEHFFYEEVSSTPLLSAGYLPSIENYNEPFLSAVKEYDDGKDLTTYDFEADCFSSPYDDLNKRKLAYRHRAIGEKYTKRGLEKILDHHMIKVWNDLYSATDKYTDGWLSSALMWHNQMLMWYNRVLMRLKLYKVGASVPCMRPSHKLLEEAMGKSTAESTAKHSSINCIVTSGSLIPSLAKCLLYRLDDVVAFENVYSSWEVGKLQCFKWIKERYDGPNVRFCAIGDGHEECTAAQIMKWPFVKIEFHPDAPHRFPGLNLPTIHRIMDTVYDSSSNDVLRCRHLPIAVETLLKEIVSREMRWEGILLTLCLENN

SEQ ID NO: 337 - DNA, 609 bp, Oryza sativa
atgtcgcacaagtcacattcggactccatcttcgacgttctacctatgtatggaaagcctgtctcggtggcggcgatggcagtggaggtggcgcatccgcacgatggtggtggcgtcggccggatccggcggcgaagaagacggtggagagtcagtatcgacttcagagccatggaatcggccgatgggaattatcaagtcgccaatagtcggattcttacggcggcggtcgcggtgggactacaagcgggagcagtgacgggacgacgagaaggatcaacggcgggacgaagaacgggagcagcggcggctggcacgatgacgtcagagagggacgattgcaatgagcaccgatcgggctctccccgtggcgccatctcatgctcccacgcacgccgccgcgacatgctcgatgaagaggctctcctgggcgtcgtcatcatccaggatttggctcccagggcgttcagggtggcccagagcatgtgcccggttgaattgattgatagctcgcgtcgatcgatcgtgctacataaccggcaactcgatcgaaacagcaccacagctcagctcaacaggggcttcgatgaagacaatagtctttgttag

SEQ ID NO: 338 - protein, 202 aa, Oryza sativa
MSHKSHSDSIFDVLPMYGKPVSVAAMAVEVAHPHDGGGVGRIRRRRRRWRVSIDFRAMESADGNYQVANSRILTAAVAVGLQAGAVTGRREGSTAGRRTGAAAAGTMTSERDDCNEHRSGSPRGAISCSHARRRDMLDEEALLGVVIIQDLAPRAFRVAQSMCPVELIDSSRRSIVLHNRQLDRNSTTAQLNRGFDEDNSLC

SEQ ID NO: 339 - DNA, 1131 bp, Oryza sativa
atggccggcgctcccccgacggaggcggagaaggagtccctcgtcacctccttcctcgagatcgccgccggccagacgcccgagacggccacccagttcctccagcagatgacgagctggcatctggaggaggcgttgcagctgttctacatcgtgcgggcaccgctgcccacaaagcgggagactctctacggcgatgcccccatggtcgtcctaattcaacagttgcatttcgcatctagttctcgtgataatctggcggcattgtatcgtccaccatttgctttgatgttcaatggacccttcgacaaggacaagtggctcttgatcaatttgcaatcgactgaagagttcagctctcacatgcttaatcgggacacttgggctaatgaggctgtggctcagacaattcgatcgaactttattttctggcaggtttaccatgacaccagtgaggggaggaaggtatgcacctactacaatttggtctctgttcctgccattcttctgattgaccctatcactgggcaaaaaatgcgtgggtggaatggaatgattcacccggaccgtttgctggaggacaaaggtccaaaggagcaccatgcagctcaacctcaaaaacggccaagaaaagttgatcaggaagacgaagaactagcacgggcagtagcggcttctcttgaggagagtaaaggctctgacactagtgaggaaaagattgaacctgaggtagaaaatgagcctagcctgagtgctaagctgaactatcctcctctccctgaagaacccaaaggaagtcgggagcttttgtgcagagttgcaattcgcctacctgatggtaggaggatccagaggaatttccttcacacggatcctattaagcagctcctgtggtcattctgctatcctcaagtggaggacggggataagaaggctttccatttcgtacagcccattcctagggcatccacaaacctggagtacgagagtgataaaactttcaaagaagccgggttggccaactcgatgatcaaccttttgtgggactaaaagcctattttatcaactcatgttatttctttattggctccaagtcaagattatcgagtgattttctgtgagggttcataa

SEQ ID NO: 340 - protein, 349 aa, Oryza sativa
MAGAPPTEAEKESLVTSFLEIAAGQTPETATQFLQQMTSWHLEEALQLFYIVRAPLPTKRETLYGDAPMVVLIQQLHFASSSRDNLAALYRPPFALMFNGPFDKDKWLLINLQSTEEFSSHMLNRDTWANEAVAQTIRSNFIFWQVYHDTSEGRKVCTYYNLVSVPAILLIDPITGQKMRGWNGMIHPDRLLEDKGPKEHHAAQPQKRPRKVDQEDEELARAVAASLEESKGSDTSEEKIEPEVENEPSLSAKLNYPPLPEEPKGSRELLCRVAIRLPDGRRIQRNFLHTDPIKQLLWSFCYPQVEDGDKKAFHFVQPIPRASTNLEYESDKTFKEAGLANSMINLLWD

SEQ ID NO: 341 - DNA, 423 bp, Oryza sativa
atggcgaagggacagcgtggcgagccgatgcccatggcgaggatgttgttgaggtcggagcacgatagagtacagaggatggcgagcaggttggagggcgttgggaagggcgggcactgtgtggcgagcagtgtccgtgagagggagttgagatcggtgaaggagaggaaggaggtggagaagacgaagtggcggaggaggtggcggagatcgtgctgggagaggtgcggcggttggaagggggaggggaggacgaacagcgtggtgtggcgagcaacagtggtgcgaagacggatgagacaggggagaggaagaggagcaggttgggaagcgggagctcacccgccactgcccatggcgaggatgccatcaaggttggaggatggcggagacagtggcgggcgccacggtggtgaggcatga

SEQ ID NO: 342 - protein, 140 aa, Oryza sativa
MAKGQRGEPMPMARMLLRSEHDRVQRMASRLEGVGKGGHCVASSVRERELRSVKERKEVEKTKWRRRWRRSCWERCGGWKGEGRTNSVVWRATVVRRRMRQGRGRGAGWEAGAHPPLPMARMPSRLEDGGDSGGRHGGEA

SEQ ID NO: 343 - DNA, 1431 bp, Oryza sativa
atggccgccgccaagctgcagtgcctgaccgacgccgaatccgaatccgaccgcgagatgcgcgtgcagcgttcgtcgtgcccagcgtgcgccatgcgtgcgacgacgggcgcgcggcatcttcaccccccatggaggcgcgggctgaggcaccaccgacagtcgacgatgccgccgcgcgccagcagggggaggctcgccgacgcggccctcttcaccgccggcgccgtgctggggtccgtgctgctgctgacgctcgcctcgcccttctcctcctcgtcgtctccgtcgtccggcgtggggagcggtgaggtcgaccggctcggcggcgggcgaacgttctacgacgacccgggggtggcgtacaccatcgaccggcccatcgtcgggtgggacgagaagcgcgccgagtggctccgcgcgcacccggagctggctggaggcggcggcgagcgcgtgctgatggtgtccgggtcgcagccggagccgtgcgggtcgcctgcgggggacagcttgctgacacggctgctgaagaacaagctggattactgccggctcaacggcgtgcagctgctgtacaacacggcgctcctccggccgtcgatggacaggtactgggcgaagatcccggtggtgcgggccgccatggtcgcccacccggaggcggagtgggtgtggtgggtggactccgacgcggtgctcaccgacatggacttccgcctcccgctgagccggtaccgcgaccacaacttcgtcgcccatggctggccgcacctcgtgtacgagtccaggtcgtggaccagcctcaacgccggcgtgttcctcatccgcaactgccagtggtcgctcgacttcatggacgcgtgggccgccatgggggccggactcgccggacactggggcgccgtgctcacctccaccttcaaggacaaggtgttcaacgagtccgacgaccagtcggcgctcgtgtacatgctgctgcagagcggcagcccgtggcgggacaaggtgtacctagagagcgactactacttcgaggggtactggctggagatcgcggggaggctcggcaacatcacggagcggtacgaggcgatggagcgcggggcggcgccgctgcggaggcggcacgcggaggcggagcacgcgtcgtacgcggcggcgagggacgccgcgctggcgggcgccgggctggcggagagcggggtgagcgggtggcggcgcccgttcgtgacgcacttcaccggatgccagccgtgcagcggccaccggaacgagcactacacggggaagagctgcgacgagggcatccgccgcgcgctcagcttcgccgacgaccaggtgctcagggcgtacgggttccggcacgccggcccgctcagcgacgccgtgagcccgctgccgttcgaccaccccacgcaaacggcgtga

SEQ ID NO: 344 - protein, 476 aa, Oryza sativa
MAAAKLQCLTDAESESDREMRVQRSSCPACAMRATTGARHLHPPWRRGLRHHRQSTMPPRASRGRLADAALFTAGAVLGSVLLLTLASPFSSSSSPSSGVGSGEVDRLGGGRTFYDDPGVAYTIDRPIVGWDEKRAEWLRAHPELAGGGGERVLMVSGSQPEPCGSPAGDSLLTRLLKNKLDYCRLNGVQLLYNTALLRPSMDRYWAKIPVVRAAMVAHPEAEWVWWVDSDAVLTDMDFRLPLSRYRDHNFVAHGWPHLVYESRSWTSLNAGVFLIRNCQWSLDFMDAWAAMGAGLAGHWGAVLTSTFKDKVFNESDDQSALVYMLLQSGSPWRDKVYLESDYYFEGYWLEIAGRLGNITERYEAMERGAAPLRRRHAEAEHASYAAARDAALAGAGLAESGVSGWRRPFVTHFTGCQPCSGHRNEHYTGKSCDEGIRRALSFADDQVLRAYGFRHAGPLSDAVSPLPFDHPTQTA

SEQ ID NO: 345 - DNA, 315 bp, Oryza sativa
atgccaaagggggagaaaattgcaatcgaagggggtcaacattttggtttttgctgcttgttgcctgctctgtctgtttatcctgaagttctgaatcctcttatccggaagttccggacctggcagctccctcgctatattcctgtcagcttgtccggaagttccggactaggatctttggtgagcacttggaatatctcgtgggctgtcatctcggtgcttattactcttggagatgatctcctagacgttctttttgctgagattctagaggctttccaagtagagcaacccacacttgtggcggatttctag

SEQ ID NO: 346 - protein, 104 aa, Oryza sativa
MPKGEKIAIEGGQHFGFCCLLPALSVYPEVLNPLIRKFRTWQLPRYIPVSLSGSSGLGSLVSTWNISWAVISVLITLGDDLLDVLFAEILEAFQVEQPTLVADF

SEQ ID NO: 347 - DNA, 2640 bp, Oryza sativa
atggggatggtgctgggcaagatcacggtggagacgcccaagcacgaggtgctccacaccggcgccggctacgaggtccgcaagtacccgccgtgcgtcgtcgccgaggtcacctacgaccccgcggagatgaaaggcgaccgcgacggcgggttcaccgtcctcggcaactacatcggcgccctcggcaacccgcagaacaccaagccagagaagatcgacatgaccgcgccggtcatcacctccggcgagcccgagagtatcgccatgacggccccggtcatcacctccggtgagcctgagccggtggcgatgaccgcgccggtgatcacggccgaagagcgcagccaggggaagggtcagatgacaatgcagtttctgctgccgtccaagtacagcaaggtggaggaggcgccgcggccgacggacgagcgggtggtgctgcggcaggtgggggagaggaagtacggggtggtgaggttcagcggcctgaccggagacaaggtggtgaaggagaaggcggagtggctcaaggccgcgctggagaaggacgggttcaccgtcaagggccccttcgtgctggcgcggtacaacccgccgtttactctgcctccgctgcgcaccaacgaggctggccgtcgagatcgaatttggcccatattagttagcggtgcagcaccgttccgtttcaatgttgggcctacaaagcgctcagatccatacccgcaaggctgcaacccagtttatggattcgggcgcaacccgacatccttaacggtcgctaaacccttcaacgcgaactggatagagtcgaacaccttcgtcttctaccaggcttcccaccgaaggagagagccggctatggccatggcggcctccccattcctcatcttgccatccttattccccaagcccaccatcctcgccgcgcgcatccaccccagcatcttccgaggccgccatattcgctgctccccgaacggcgccgccgtaccggaatcccctgaacccgccccaccgccgcgggcccaggaagtcccatccccgtcgccgccgaaggcgaagaccacgaggcgcaggaccaagaagaatacgcaggagtctgattcagagggcgaagaggagccgccgaagcggcggggccgtcggacaaggaaatccaagcaagaggccgagcaggaggcggcggagaaggaggatgaggtccgggcggcgagccccggaacggaggattcgaagagagcggtccaagatgaggatggggaggcggaggcgacggggagcgactccgaagacggggaggattcgccgtacgactggccgccgctggtgtgctgcttcggggcgccgcggtgggagttcgtcccgacggtgcgggtgtcggaccggcagatgcacccggacatatactccacgtggctgcatctgcagtgggagcctccggagttcgcgcgcgcgccggggagcgcggcgagcaacgtggccatcgcgctcaccaggctcggcggccgcgccgcggtgctcggcaaggtcggtgacgacgacttcggccgcgagcttgtgtaccgcatgaactgcgagcgagtgcagacgcgcgccatcaggttcgacgacggcgcggccacggccactgcgcgcatgaaggtcgggttccgggaccgtgaggacggcagcggcggaacgaggcttgtggctgagacggtgaagagcgctgccgaggactccctcagcaaggctgagatcaatgtggatgttttgaaagaggctagagtgttccatttcaattcagaggtcctattgactccctcaatggaaagcacactcttcagagcaattgaactgtccaagaaatttggaagtaaaatattctttgatcttaacttgccattgcctttgtggaggtcaagggatgaaacaaaggagttgataaacaaggcatggaatgaggctgatattatagaggtgtcaagggatgagttggaattcctccttgatcacgagtactatcaatataagcgtgccaatccacctcagtattatctggatggttttcatctaacaaggaactggccacagtactaccattacacccccgaagaaattgctcccatttggcatgatgggataaaactcttgcttgtgacatacggaacacttaggatccactactacacacccaagtttcatggctgcgtgattgggacggaggatgcactcataactccatacacaactgaccggacaggttctggagatgctgttgttgctgctgctattagaaaattgacgtcttgtcctgagatgtatgaggaccaggatacattggagaggaatctgagattcgctgttgctgccggaatcatttcgcaatggactattggtgctgtgcgaggattccctactgagagtgctgcccagaacttgaaggagcaaaacaatgctcatgatatacaagtgtatttcatgagtgctgcaacagaggtggtcaagggaaaagttttaccaaaacagcttacaggcttttcagtgttcagttttagttggaaaaatgtgtctgccacttggaggcttccattgctttacagttttgaagagctatgtttacctattgacttccatggtagggatgcaagtgtctaa

SEQ ID NO: 348 - protein, 879 aa, Oryza sativa
MGMVLGKITVETPKHEVLHTGAGYEVRKYPPCVVAEVTYDPAEMKGDRDGGFTVLGNYIGALGNPQNTKPEKIDMTAPVITSGEPESIAMTAPVITSGEPEPVAMTAPVITAEERSQGKGQMTMQFLLPSKYSKVEEAPRPTDERVVLRQVGERKYGVVRFSGLTGDKVVKEKAEWLKAALEKDGFTVKGPFVLARYNPPFTLPPLRTNEAGRRDRIWPILVSGAAPFRFNVGPTKRSDPYPQGCNPVYGFGRNPTSLTVAKPFNANWIESNTFVFYQASHRRREPAMAMAASPFLILPSLFPKPTILAARIHPSIFRGRHIRCSPNGAAVPESPEPAPPPRAQEVPSPSPPKAKTTRRRTKKNTQESDSEGEEEPPKRRGRRTRKSKQEAEQEAAEKEDEVRAASPGTEDSKRAVQDEDGEAEATGSDSEDGEDSPYDWPPLVCCFGAPRWEFVPTVRVSDRQMHPDIYSTWLHLQWEPPEFARAPGSAASNVAIALTRLGGRAAVLGKVGDDDFGRELVYRMNCERVQTRAIRFDDGAATATARMKVGFRDREDGSGGTRLVAETVKSAAEDSLSKAEINVDVLKEARVFHFNSEVLLTPSMESTLFRAIELSKKFGSKIFFDLNLPLPLWRSRDETKELINKAWNEADIIEVSRDELEFLLDHEYYQYKRANPPQYYLDGFHLTRNWPQYYHYTPEEIAPIWHDGIKLLLVTYGTLRIHYYTPKFHGCVIGTEDALITPYTTDRTGSGDAVVAAAIRKLTSCPEMYEDQDTLERNLRFAVAAGIISQWTIGAVRGFPTESAAQNLKEQNNAHDIQVYFMSAATEVVKGKVLPKQLTGFSVFSFSWKNVSATWRLPLLYSFEELCLPIDFHGRDASV

SEQ ID NO: 349 - DNA, 663 bp, Oryza sativa
atggcccctatttggctggcgatgtggggagtggagggagagagagaggtggattcgaatgcgaatccctcccatttttgggcgggcgcgagagcgggaagaggtgggggaggggcggcgacatgggcgcagggcgcgggagaggcgcaggaggcggggaaggtgggcagcgtggggagcggtggtttcggcggtgatcgatcggtccacgaccggctcacgggagagggcgacgatgacgtcgacgatgacgtcaccaccggcggcggcggctcggcggctcggacggcgcacgctcaccggcgaacggcggcgctttggcacgaactgaggacaccaacgggtagcggacggcacggcgaactcaccggcgaccaaagcgacggcggaagaccaacggacggcgacggcgacgaggttgaaacggcggcgctcttcggcatgacgacggcgacgatgctccggcggtctccgacggtggcgaagcggcggacgaggacggcgacgacttggcgagcacgacggcggtcttcccgagcgacgacgatgactggaacggcggcggcgcacggctggagcgacggcggcgacggcggcgctagggcacacggcgctagagcgctacgggcgacgagaggcgaaggcgagggtggcggccggtag

SEQ ID NO: 350 - protein, 220 aa, Oryza sativa
MAPIWLAMWGVEGEREVDSNANPSHFWAGARAGRGGGGAATWAQGAGEAQEAGKVGSVGSGGFGGDRSVHDRLTGEGDDDVDDDVTTGGGGSAARTAHAHRRTAALWHELRTPTGSGRHGELTGDQSDGGRPTDGDGDEVETAALFGMTTATMLRRSPTVAKRRTRTATTWRARRRSSRATTMTGTAAAHGWSDGGDGGARAHGARALRATRGEGEGGGR

SEQ ID NO: 351 - DNA, 1247 bp, Oryza sativa
atggcgaccgactcctcctcctccgctgccgccgataagaacaccgtcttccgcaagctccgcgccaaatcagacaacaagcagatgtgcttcgactgcaacgccaagaacccgacctgggcctccgtcacctacggcgtcttcctctgcatcgactgctctgccgtccaccgtagcctcggcgttcacgtctccttcgtcaggtcaggtcaacaaatttggattcgtggaccccagaacaattgaaaatgatggtttatggaggtaacaaccgtgcacaagctttcttcaagcagcatggttggacagatggtggaaaaattgaagcaaagtatacttcaagagctgctgacttataccggcagttgctcgctaaggatgttgctaaaaattccactgaagatgggaacaacagttggccgtcctccccagttgcagcttcacaacctacaaatcaagctgatgcaattccagatcttaagctggcagaggcatctaaagaagttgcaaatgagaagactgagcctgaggttattcgttcaccaagggctccaactcattctttcaagaagccaattgttgcgaagaagcctggaaataagaccggtggacttggtgcacggaaacttacgtcaaagagccaaatgaaagtctctatgagcagaagcctgaagagctagctcctgcgctgccaccagtgactgagaacagtacagcaaagagcaaatctcatacttcacgatttgaatatgtggaaaatacaccttctgctgggagcaattcagaagaaaaccaggtcattggacatgttgcgcccccaaaatcttcaaacttctttggcgaatttgggatggacagtggatatcacaaaaaatctgcccctggcccatccaaagtgcagcagattgaagaaagtagtgaagcaagacagaagttttcaaatgcaaagtcaatttcatcttctcagttttttggagaccaggccagttttgaaaaggaggctcaagtttccctccaaaagttttcggggatcttctgccatttcaagtgctgatctatttggtcatccaaccaatagttccaacgtggatctgagtgcttcagatttgatcaaccggctttctttccagtctctgtaggcttcccaggatctgtcttctatcaagaacatggctggggaaactgggaagaagttgacatctttggcatcgaacatcatgtctgatcttcaagaccggatcctgtga

SEQ ID NO: 352 - protein, 415 aa, Oryza sativa
MATDSSSSAAADKNTVFRKLRAKSDNKQMCFDCNAKNPTWASVTYGVFLCIDCSAVHRSLGVHVSFVRSGSTNLDSWTPEQLKMMVYGGNNRAQAFFKQHGWTDGGKIEAKYTSRAADLYRQLLAKDVAKNSTEDGNNSWPSSPVAASQPTNQADAIPDLKLAEASKEVANEKTEPEVIRSPRAPTHSFKKPIVAKKPGNKTGGLGARKLTSKSQMKVSMSRSLKSLAPALPPVTENSTAKSKSHTSRFEYVENTPSAGSNSEENQVIGHVAPPKSSNFFGEFGMDSGYHKKSAPGPSKVQQIEESSEARQKFSNAKSISSSQFFGDQASFEKEAQVSLQKFSGISAISSADLFGHPTNSSNVDLSASDLINRLSFQSLVASQDLSSIKNMAGETGKKLTSLASNIMSDLQDRIL

SEQ ID NO: 353 - DNA, 870 bp, Oryza sativa
  misc_feature (126)..(126): r = adenine or guanine
  misc_feature (144)..(144): k = guanine or thymine
  misc_feature (574)..(574): r = adenine or guanine
  misc_feature (578)..(578): m = adenine or cytosine
  misc_feature (580)..(580): s = guanine or cytosine
  misc_feature (585)..(585): s = guanine or cytosine
atggcggggaggagcgagctggtggtgagcttcggggagatgctgatagacttcgtgccgacggtggcgggggtgtcgctggcggaggcgccggcgttcgtcaaggcgccagggggggcgccggcraacgtggccatcgcggtkgcgcggctcggcggcggggccgcgttcgtcggcaagctgggggacgacgagttcgggcggatgctcgcggccatcctccgcgaaaacggcgtcgacgacggcggggtcgtgttcgacgccggggcgcgcaccgcgctcgccttcgtcaccctccgcgccgacggggagcgcgagttcatgttctaccgcaaccccagcgccgacatgctcctcacccacgccgagctcaacgtcgagctcatcaagaggagtctattggaaatttgtgtgcaattcttcatggctgccgtcttccattatggatcaataagcttgatagctgagccctgccggtcagcacatttgcgtgccatggagattgcgaaagaagctggtgcgctgctatcttatgacccgaatctcagggaggcattgtggccctcccgtgagraggmtsgcacsaagatcttgagcatctgggaccaggcagacattgtcaaggatttccgcggagctgtcccatcctacaaagtacagcaagttgatacaacaggtgcaggtgatgcgtttgttggtgctctgctgcgaagaattgtccaggatccatcatcgttgcaagatcagaagaagcttgaggaagcgattaaatttgccaatgcgtgcggagcaatcaccgccacaaagaaaggggcaatcccatcactgcccaccgaagttgaggtcttgaagttgatggagagtgcttag

SEQ ID NO: 354 - protein, 289 aa, Oryza sativa
MAGRSELVVSFGEMLIDFVPTVAGVSLAEAPAFVKAPGGAPANVAIAVARLGGGAAFVGKLGDDEFGRMLAAILRENGVDDGGVVFDAGARTALAFVTLRADGEREFMFYRNPSADMLLTHAELNVELIKRSLLEICVQFFMAAVFHYGSISLIAEPCRSAHLRAMEIAKEAGALLSYDPNLREALWPSREQDRTKILSIWDQADIVKDFRGAVPSYKVQQVDTTGAGDAFVGALLRRIVQDPSSLQDQKKLEEAIKFANACGAITATKKGAIPSLPTEVEVLKLMESA

SEQ ID NO: 355 - DNA, 837 bp, Oryza sativa
atggaggtggttctgcatgagggggatgccaaagattgggtttacaaaggagaaggtgcagcgaatctaatcctcagctacactggctcgtcaccttctatgttgggtgccaatcatgttgatggcgggaaatgtggatttcttccgtcatctgaatacatatcgaaggagaattctatcaagaaacaagtaacacggtataagatgcatcagcacctaaaatttcatctgggagagatatcgaagacaagtgaatacgatcccctagatttattttctggatcaaaagaaagaatacatatggctatcaagtcatttttttcaactcctcagaacaactttagaatttttgtggatggttctttagtttttggtggcatgggaggtggcgcagatagtgttcatcctaatgaaacagagaaatgtcttgaagatctgagcaaggttactggcttacaactatctgactttattgagctcctgtcagaggcaatctttaagtctggagtgttgggtaaacttttagccactcaaaaactggatgatcatgacatcgaaggggcgattcatctgtactataacatcatttctcagccttgtttgcattctcttccattggacaagagtgagaagattgtcagggactttcttatctctgctactgcaaaagattgtagcctaatgatcagctttcgatttattgatctggatgtgaaacccttggataagatggtacattactttaaattggatcaaaagatagtcaatttctacactagaaatggagaagttgggggagatccacgtgatcctccaaagggatgtggccctaggtga

SEQ ID NO: 356 - protein, 282 aa, Oryza sativa
  misc_feature (131)..(133): Xaa = any naturally occuring amino acid
  misc_feature (152)..(152): Xaa = any naturally occuring amino acid
MEVVLHEGDAKDWVYKGEGAANLILSYTGSSPSMLGANHVDGGKCGFLPSSEYISKENSIKKQVTRYKMHQHLKFHLGEISKTSEYDPLDLFSGSKERIHMAIKSFFSTPQNNFRIFVDGSLVFGGMGGGXXXADSVHPNETEKCLEDLSKXVTGLQLSDFIELLSEAIFKSGVLGKLLATQKLDDHDIEGAIHLYYNIISQPCLHSLPLDKSEKIVRDFLISATAKDCSLMISFRFIDLDVKPLDKMVHYFKLDQKIVNFYTRNGEVGGDPRDPPKGCGPR

SEQ ID NO: 357 - DNA, 1017 bp, Oryza sativa
  misc_feature (657)..(657): m = adenine or cytosine
  misc_feature (950)..(950): s = guanine or cytosine
atggcgtcacgggtcgtcgtcctcctcgtggtcgcggcggcgtgcgtgctcggcgccgcagacgcgaagctcggcaggctggtcgtcaccggcgtcgtgccctgcaacaccggcagcctcatcgatatcgccacgtcccccgccttcccaaacgcggacgtggagctgaggtgcgcggggaagctggtggcgggggcgacgacgaacagcaacgggtcgttcgcgatggaggcggacctgacgagcgggctggcgatgctcatcggcgggtgcaagctggtggtggacacgccgctgatcaaggcccgctcaccaggctgctcggcggcatcttccgcctcttccccgccggcttctccttccacgcccactaatatacaacatctcattatgcaaatctcgatttggtcctatcttgtctatggaaactggatacttggtaaccctcttgggggtattgttgagatactcctcctccctctcttagcaaggatatctgggcccgacggtgactggactcacttagcggtgactgatccttctggtagtgatcggcgtcgcggtggtcagcgtggttgcatcggcggcgccgccgggcagccaccgcgcatacaagcggacgtcgtcgtgatgggctacgtgccgtgcaacaacggmacctccatgaaatcgggctctgctcccgggttcccaaacgcggtggtgcagctgcagtgcgcgggggacgccgtggcggcggtggcggcggggagcgcgacgacggacggcaaggggtggttccgcatggcgatgaacacgacggcggcgctgtcgagcgtggccagcggctgctcgctggtggtgaccacgccgctggcgacgtgcgacgcggcgctcccggcgacgggacgctccagtccggcctccggctcctcgtcagcatggtcttcttcccgcgtggcttctcctasgtcgtttgatctgttcgtctgggtcccatggtcaattgctctacgtgcagttagtatctacgcctga

SEQ ID NO: 358 - protein, 338 aa, Oryza sativa
MASRVVVLLVVAAACVLGAADAKLGRLVVTGVVPCNTGSLIDIATSPAFPNADVELRCAGKLVAGATTNSNGSFAMEADLTSGLAMLIGGCKLVVDTPLIKARSPGCSAASSASSPPASPSTPTNIQHLIMQISIWSYLVYGNWILGNPLGGIVEILLLPLLARISGPDGDWTHLAVTDPSGSDRRRGGQRGCIGGAAGQPPRIQADVVVMGYVPCNNGTSMKSGSAPGFPNAVVQLQCAGDAVAAVAAGSATTDGKGWFRMAMNTTAALSSVASGCSLVVTTPLATCDAALPATGRSSPASGSSSAWSSSRVASPRSFDLFVWVPWSIALRAVSIYA

SEQ ID NO: 359 - DNA, 864 bp, Oryza sativa
  misc_feature (189)..(189): r = adenine or guanine
atgctagcggttatgatccagagagcaaataatgcaggacagcttgttggactggtgcatcatctcattgatggtggattgtccatcctccaatatgctgatgatattatactctttatggaacatgatctagagaaagcttgtaatctaaaaatgttgttgaacgttttcgaagaattatctggcttraagattaattttcataagagcgagctttactgctttggtgaagcccaaacagctcaggatcaatatactaacctttttcaatgtgaggttggttcttttccattctgttaccttggcattcctatacatcataggagacctcgtaattcggagtggaaggaagtgattgagcggcttgaaaaacggttggcaagagcgatcaagaagattgattatttccgatcaaggttcttttggcaaggggatggacacaaaaggaaatatagactagcaaggtgggacatcatatgtcgtcctaaagaccaaggaggggccaagcctgattttctcaggtttggctccttcaacatcaaagatggctctcaagttcggttttgggaagataaatgggaccttactggctctaagttagtggcgtggaatcaccttctctcacgcatcgctaatattatattatctcacgaccaagatgagtttaaatggaatctaaccactgatgggagattctcggttaaatctctttatcttgcgttggtgcagaccgatgttatcttggctccgctcataggctatccttcagaaggtcaatttgcggggtactatcattgcggcttgtcaacaattggagctagtggccatggagttttctaccccggcgcatgggtggcgttctag

SEQ ID NO: 360 - protein, 287 aa, Oryza sativa
MLAVMIQRANNAGQLVGLVHHLIDGGLSILQYADDIILFMEHDLEKACNLKMLLNVFEELSGLKINFHKSELYCFGEAQTAQDQYTNLFQCEVGSFPFCYLGIPIHHRRPRNSEWKEVIERLEKRLARAIKKIDYFRSRFFWQGDGHKRKYRLARWDIICRPKDQGGAKPDFLRFGSFNIKDGSQVRFWEDKWDLTGSKLVAWNHLLSRIANIILSHDQDEFKWNLTTDGRFSVKSLYLALVQTDVILAPLIGYPSEGQFAGYYHCGLSTIGASGHGVFYPGAWVAF

SEQ ID NO: 361 - DNA, 1204 bp, Oryza sativa
  misc_feature (127)..(127): m = adenine or cytosine
  misc_feature (669)..(669): r = adenine or guanine
atggcgcgggggttccgcggcgtccgggacgacctcaccgagctaggccgccacatcctcgacatcgcctgcttcctccacccgctcctcggccccgcccacctcaccgtcgacttaccgcccgccmacccccacccaccgccaccaccaccaccgccgctccccttccccgcgccccgccagccggccttcccctccatcctcgccggcatcctcgccgacctcgccgagatcggcggctcctttcaccggtggcttcgcccgccgcgccgccctccccgaacctgccttctcctccgcctccgcctccgcttccgccaccaccgcggagtccccgcgcgccgcttcctccacggcctcctctccttccccttcccctgctgccgctgccgctgctgatgtcgctgatgacgtcgtcggggcggcgcaggcccttgcggcgcggcccgaggcgtggattgacttccccgtgctcgcgctcgatgagattctataatctccgatatccaaagggatcatatggaagccattgaaaaacttgtacctgacttagcatctctgagagctaggctctgcccttcttacatggatattgatgtattctggaagatctactttacgctgcttgagtcgaaccttactgaacatacttcagagaggtagatgagratgtaaccaggttctgttcatcacggtcaatgagatagagtctgattctgcgcctaatgtttgtgaaattgaaagtgtgaaaagcactcaagagggttatcaatcgccagatgatcgtgtgttgataaaaacaagatccaatcaaagcattgaccaatgggtgtttgcaaagtcaaaatctgagcaaagcatggatcagtggtccgaaataccttcggatgtggaatcttctagagatggtagaagatacattagcggtgaggagcttagcgacgctgacagtgcccatattgttgtcatggacaaatacatggattcacttctgtcagatcggaggagcctccactatgctagctcctcagtccggcgggattcagctagattggacgcggttagaatgccctgcggcagctgcctcgccgttgctggcttcttgttcttcgtcgtccggcagctgcatttgggcgtgaaacgctgtgttcttcgctgtctggattcagtggtggagctagaaaaatttttgagcccgaactaa

SEQ ID NO: 362 - protein, 400 aa, Oryza sativa
  misc_feature (15)..(15): Xaa = any naturally occuring amino acid
  misc_feature (42)..(42): Xaa = any naturally occuring amino acid
  misc_feature (55)..(55): Xaa = any naturally occuring amino acid
  misc_feature (223)..(223): Xaa = any naturally occuring amino acid
WRGGSAASGTTSPSXAATSSTSPASSTRSSAPPTSPSTTARXPPPTATTTTAAPXSPRPASRPSPPSSPASSPTSPRSAAPFTGGFARRAALPEPAFSSASASASATTAESPRAASSTASSPSPSPAAAAAADVADDVVGAAQALAARPEAWIDFPVLALDEISIISDIQRDHMEAIEKLVPDLASLRARLCPSYMDIDVFWKIYFTLLESNLTEHTSERDEXCNQVLFITVNEIESDSAPNVCEIESVKSTQEGYQSPDDRVLIKTRSNQSIDQWVFAKSKSEQSMDQWSEIPSDVESSRDGRRYISGEELSDADSAHIVVMDKYMDSLLSDRRSLHYASSSVRRDSARLDAVRMPCGSCLAVAGFLFFVVRQLHLGVKRCVLRCLDSVVELEKFLSPN

SEQ ID NO: 363 - DNA, 1191 bp, Oryza sativa
atggcacagcaacatccgtgcgcgcaccgggacccgggcggcgtggagatgggcgtcccggccgtgtacccgccgctgccgaacccgaacgagcaggccatggaccaggagcggctcggcgggggaggccccaaccactgggtgggcaacgacgccaacacgctgctggttgtggccacgctgatcaccacgctcacgtaccagctcggcaccaacatccccggcggctactggcaggacaccaaggacgaccaccgcgccggcgaccccatcatgcgcgacctgcaccgtcccaggtactgggtgttcatgggggcgagctggatggggttcgcgagctcgatggtgatgacgctgagcctgctggtgcggatgcccgtggactcgcgcaacgtccggtggtcgttcgcggtggcgtactccacgctggtgctcacgttcatcgtgtcgcagcccaggacgcacctgtcgctggacatcctcgtctgggcgacgaactctgccgccgtcggcctctcctccctccccatcggcgcttctccactcccgacaccgctcaagcccaacccacatggggacacagtggcggtcgaggaggccgagcgaatcgacgacgatgagctcctcaaagtgcgagagggcgacaacttgatgagctcctcggtgcgcgaacgggggacgacgtcccatgggagcaggcggagcggtggtgcaggaagtcgacggggcggcggcaggcagagtggggtgacggcagccggagcaacgacggcgcgcgaagccgaaggggcgaagcagggcggcggcgagcgaagcagcagcaatccactgtcggcgccgatctccacaatggaagtttgtgtcctcctcttcctccttctcgaacccatcgccatcgtcttcgtcatcttcaacggccacaatggcggggaagcaggtgggaagcgggagctcacccgttgtcgcccacggcaaggacgctgtcaagagagcagctcggaggatggcgaatgtggcggcgagggccgcgatggtgatggtgaggtgcgcgtcctcctcctcctcgaactcgttgttgttgtcttcggcggcagctatgatagggaagcagtcccggcagagaaggccacgcagccctttggctatctgtactttttctccttctatcaatataacgccaatcaattctga

SEQ ID NO: 364 - protein, 396 aa, Oryza sativa
MAQQHPCAHRDPGGVEMGVPAVYPPLPNPNEQAMDQERLGGGGPNHWVGNDANTLLVVATLITTLTYQLGTNIPGGYWQDTKDDHRAGDPIMRDLHRPRYWVFMGASWMGFASSMVMTLSLLVRMPVDSRNVRWSFAVAYSTLVLTFIVSQPRTHLSLDILVWATNSAAVGLSSLPIGASPLPTPLKPNPHGDTVAVEEAERIDDDELLKVREGDNLMSSSVRERGTTSHGSRRSGGAGSRRGGGRQSGVTAAGATTAREAEGAKQGGGERSSSNPLSAPISTMEVCVLLFLLLEPIAIVFVIFNGHNGGEAGGKRELTRCRPRQGRCQESSSEDGECGGEGRDGDGEVRVLLLLELVVVVFGGSYDREAVPAEKATQPFGYLYFFSFYQYNANQF

SEQ ID NO: 365 - DNA, 2025 bp, Oryza sativa
  misc_feature (43)..(43): r = adenine or guanine
  misc_feature (45)..(45): r = adenine or guanine
atgaagagactcggcgtcatcgaggatgagaacaaggcggacrarcgggatatcctccggtaccttgagctgttcaaggctcccctggcgccatctcatgtacaggcgctggcggcgctctgcagtgtggcggaattgctggtggttgggcagctagtggttggggcctggtgcgtggttggagatttcaacctcttggccgcggacggtgataaaaacaatgggaatgtaaatcgacggttgatcaacaagtttaggcacaccattgacgcccttgagctgcgcgaggcgctcagctcctctgcctctgaccactatcccctgttgctggcctgcgatcagatgatgcataggccgaggaagttcaagttcgaatcctattgggccaaattggagggtttcgaggttgtggtccgtcaggcgtgggcggcagtgccggccggctccaacgcgctcagcagccttcacttcaagctgcatgcaactgctgctgccttacggtcctggggagccaagcgtatcagtgagctccgtcagcaactcgcgatcgcccatgaagtagttttccaattggacaaggcccaggatgatcgtcttctgtcggctggtgaaagatcattgcgggcatctctgaaaggtcgctgcctcgcgctcacctccctggagcgcattcggctcagacagcgtgcccgcttgcttttcctgaaacatagcggcaccacggctcaattcttccgcctcaaaatcaatgctcgtcgaaggaagaaggcaattccctctatttgtcaggacgacatcattgcaataactaaagaggacaagcttcaggctgcgtatgattattttctcaaaattcttggcacgccttgccccccgtcggcatcccttgccttcgatgcgatcggcttggcagtgcatgatttctctgatttggagcgcgacattactgaagacgaggcgatgaaggcgatcatggaaatgccgagcgacaaggcaccggggccggatggctttagtgccaccttctacaagaaatcctcaattgtcctgctgccaaagaaggaggaaccgaatcaactgtcagattttcggccaattagtttgattcacagcttcgccaagattctcaccaagattttggctttgcgacttgcgccgaggatggatgagctaattgggccgacacagtctgctttcatcaagcgccgaaggatacaggagaattttctatatgtgcaggagggggtggtcaaaaacctccatcgttcgaaaacgccagccatgctcttgaagattgatattgcgaaggtgtttgatactgtttcctgggaattccttcttggtctgctccggcacctgggttttggggtccgatggagggattgcatcgcgaccttgctcttcattgcctccacttctgtcatcatcaacggcagagattcgcaacggatcaggcttgctcgtgggttgcgtcatggggatcccctctctccactgttgttcgtcatcgtcatggaagctctggtggccctatgtgcaacggctgtgcagcgaggagagctttctcctcttgccaatgtacatctaccgctgcgtgcctcgctctatgccgacgacgcggtgatcttcttccacccctccagacgcgatgcgctgacaatcaattttgtgctcaagctgatgggtgaagcattgggcaggatgaagtgccctattggcaagattatttggaaatcccgtgcaccggcgagatgcaagttctttatgtttctcgccatgcgcaacgcttgcctcaccgccgacaatctacaacgccgcggatggagccttcccaggtgtgccatctgtgctccaacgacggggaaacctgtcagcacatcttcatggactgcgcttacacccagcagatttggggtcgggtgcgcacgcgtctgggcctttcgtgctcttcgccgtcggcggatagcacggaaatctgttgctaaggttgaccgcaaaacattcgatgcggggttatacttgtaa

SEQ ID NO: 366 - protein, 674 aa, Oryza sativa
MKRLGVIEDENKADHRDILRYLELFKAPLAPSHVQALAALCSVAELLVVGQLVVGAWCVVGDFNLLAADGDKNNGNVNRRLINKFRHTIDALELREALSSSASDHYPLLLACDQMMHRPRKFKFESYWAKLEGFEVVVRQAWAAVPAGSNALSSLHFKLHATAAALRSWGAKRISELRQQLAIAHEVVFQLDKAQDDRLLSAGERSLRASLKGRCLALTSLERIRLRQRARLLFLKHSGTTAQFFRLKINARRRKKAIPSICQDDIIAITKEDKLQAAYDYFLKILGTPCPPSASLAFDAIGLAVHDFSDLERDITEDEAMKAIMEMPSDKAPGPDGFSATFYKKSSIVLLPKKEEPNQLSDFRPISLIHSFAKILTKILALRLAPRMDELIGPTQSAFIKRRRIQENFLYVQEGVVKNLHRSKTPAMLLKIDIAKVFDTVSWEFLLGLLRHLGFGVRWRDCIATLLFIASTSVIINGRDSQRIRLARGLRHGDPLSPLLFVIVMEALVALCATAVQRGELSPLANVHLPLRASLYADDAVIFFHPSRRDALTINFVLKLMGEALGRMKCPIGKIIWKSRAPARCKFFMFLAMRNACLTADNLQRRGWSLPRCAICAPTTGKPVSTSSWTALTPSRFGVGCARVWAFRALRRRRIARKSVAKVDRKTFDAGLYL

SEQ ID NO: 367 - DNA, 831 bp, Oryza sativa
atgaagatggagcagcaaaacacgaacagcaaggagggcgtcgaggtgctgcaacaggtcccatttgaggatgagaagcttggcaagggccaatacacctcgaagaattatcatttgcagagcaaaattccatcttggatgaaaggttttgcgccagcaagtgcacttaccgtgcatgaggaatcatggtgcgcatatccaaacagcaggacaggtttcttgattatttgttatcagtgcccgctttttagcaagtgttcactgaccatcgacactgtgatcagacctgacaatggctgctctgagaacaccaaacggcaaatactaagagagcacaatgtacataaccaggcccacaatttaaccagtgaacaattagctgcaagagaggtagaggtcgtcgacatcgcgttgcagtcgagggactactggagcaaggtgatcagcgccccaaacgtcgacctgacagccttcaggtcgcagaggacgagccgaggccctctcttgaagggttggatggattcatgccgtcccgtcatgaccacgtacaagctggtgatcatggacgctccgatctggggcttgggtgaacgcctggaagactgcatcatcgcgggggagagggcgctgttcttggcgtgccaccggctgtgcttcgcgtggatcgacgagtggtacggcatgacgttggatcagatccgagagatggagcgtcagaccgacctgcttctcaagaagacgctgaagaagcctgcgaaggccgggagcaagcacgatggcaagaggaagacgctcaaagaggagattgtagctgtcgggagctgcacgtag

SEQ ID NO: 368 - protein, 276 aa, Oryza sativa
MKMEQQNTNSKEGVEVLQQVPFEDEKLGKGQYTSKNYHLQSKIPSWMKGFAPASALTVHEESWCAYPNSRTGFLIICYQCPLFSKCSLTIDTVIRPDNGCSENTKRQILREHNVHNQAHNLTSEQLAAREVEVVDIALQSRDYWSKVISAPNVDLTAFRSQRTSRGPLLKGWMDSCRPVMTTYKLVIMDAPIWGLGERLEDCIIAGERALFLACHRLCFAWIDEWYGMTLDQIREMERQTDLLLKKTLKKPAKAGSKHDGKRKTLKEEIVAVGSCT

SEQ ID NO: 369 - DNA, 924 bp, Oryza sativa
  misc_feature (131)..(131): m = adenine or cytosine
atggcccctgggcggacacccgcttcatccctgtcggcgtcgacggcaccggggacagccgtcggagccgctgccgcagccgccgcgccaccgcggcgcgtaatcccggcggggtgctcgccctgggcgamgacgccgagtggcacgtcatcggctgccgcggcgggcgcgtcctcctcctcagccccaaggcggctccgcctcctggtgctggagcccatgctcggccgccgccagtacatcccggcgccgccggcgccggagtacaggccggcatacttcagcaacgccgccgtggtctccgccgcggggggccacgacgagctccgcctccggccgcacctgttccgcgtggtgttcgtctcgagcaacgccgccaccaagcgctccaccgccttcgtctacaactcggcgacgttccggtggaccaaggcggcggcgacagagatgtcgtcggtgatcgacggccggccgagcgtcctgatcggccagaccctctactggcacctcatctcgcacggcctcgtcgcgttcaacctggagacgcacgagctgcacgagatcctggtgccggccgacgcgttcgacgacgtgcacgatgccaacctgagcatcgtcgtccccaggagcggcggcggcggagtcggcctcgccgcggtgtccgggtacatcctccagctctggacgctgcgcgactacacccacggcgcgtccacctgggacctgcgcaacatcgtggtgctggacgcgctgctccccctgcgcaacgctcggctgccgccgccgccgcagctgccggcgtcggcgaagccgatgcctctggtgtggttgatggcgctggacgaggatgagaacgtggggtggaagtgcagccatgattatgtaattctactccttcctgggaaaaaaagaacagtaggatag

SEQ ID NO: 370 - protein, 307 aa, Oryza sativa
MAPGRTPASSLSASTAPGTAVGAAAAAAAPPRRVIPAGCSPWARTPSGTSSAAAAGASSSSAPRRLRLLVLEPMLGRRQYIPAPPAPEYRPAYFSNAAVVSAAGGHDELRLRPHLFRVVFVSSNAATKRSTAFVYNSATFRWTKAAATEMSSVIDGRPSVLIGQTLYWHLISHGLVAFNLETHELHEILVPADAFDDVHDANLSIVVPRSGGGGVGLAAVSGYILQLWTLRDYTHGASTWDLRNIVVLDALLPLRNARLPPPPQLPASAKPMPLVWLMALDEDENVGWKCSHDYVILLLPGKKRTVG

SEQ ID NO: 371 - DNA, 363 bp, Oryza sativa
atgtcgaacaaggctacggattcttcccagctcatcgagcagaagttcgccatggccaagcagagctcccatggaggcggccattgccgggctgaaagcagcggccgtcactgctgtctgcaccgcgatccccacctttgccagtgttcgtatgtccaagtgggcaaaggccaatctgggcaacccagtcgccaagacagtcatcatcacctacggctgctggcatggcctacttcatcgccggggagaagaaggtggtggagctgtccaggaagcactccctcgaggctgcaaaggccagggctaaatctgaatatactctcacaaaatcgaactagatttgcagcaatatggcatcaatga

SEQ ID NO: 372 - protein, 111 aa, Oryza sativa
MSNKATDSSQLIEQKFAMAKQSSHEAAIAGLKAAAVTAVCTAIPTFASVRMSKWAKANLGNPVAKTVIITTAAGMAYFIAGEKKVVELSRKHSLEAAKARAKSEYTLTKSN

SEQ ID NO: 373 - DNA, 444 bp, Oryza sativa
atgacgcgagcgcgcgtcggcgctgggccctttgggccgaaacgcgcaccgccggcacgcgcgtgcattagcgattccgctgcgcggccggccgatctcctccacgccacgtgcacgagaggaggcgccgcccaggccaatcgccaacacagcgagtacgtgaagcgatgtggtccgctgcaccacgcccgcagtcggcgggcatacgacgcgatttgcgggctctccacgtacgtgcatgcagctgcggcctgcgggcacgcctcggaggcgtgcgcaccgccggcctgggagttcgaccgtctgacattggttcatgccatcgatcggttctacgacgcgtgcggtcgtactgaccacgcgcacacatgtgcccaggactgcgcgcttggactcgccagatggctggccgcgtatgtggtacgcgcgcactacgcccagtag

SEQ ID NO: 374 - protein, 147 aa, Oryza sativa
MTRARVGAGPFGPKRAPPARACISDSAARPADLLHATCTRGGAAQANRQHSEYVKRCGPLHHARSRRAYDAICGLSTYVHAAAACGHASEACAPPAWEFDRLTLVHAIDRFYDACGRTDHAHTCAQDCALGLARWLAAYVVRAHYAQ

SEQ ID NO: 375 - DNA, 1175 bp, Oryza sativa
atgctgtcggggtgcacggtgtccagtctcgcggcgaggttcgccttcttcccgccggagccggcgacctacgccgtcaggaaggatgaggcgtgcggcggcggagggcggctggtggcgtcgggcgtcccgcgggacgccgccgtggacgtgctgctggtggacaccaggaaggggagcaaggtggtggccttctacctgaggaaccccgccgcccgcctcaccgtgctctactcgcacggcaacgccgccgacctcggccagctctacgacctcttcgtgcagctcaaggtcaatctcaaggtcaatctgatgggtatgactactctgggtatggagcatctactggcaagccaagtgaagagaatacatatgcagacattgaggcagtttaccagtgcttagaaacagagtatggaatcagtcaggaagaccttatcttgtatggacaatctgttggcagtggacctacattgcatttagcttcccgtttaccaagattgcgtggcgtggttcttcatagcgctatactgtcaggcctccgagttgtttgccatgtgaactttactttctgctttgacatctacaaactgcagaatgtgaagaaaatcaaaaaggttaaatccccagtgcttgttattcatggaactgatgatgatgtcgtgaactggtcgcatggtaacgagctgtggaaactggcgagggagccttacgatccgctatggatcaaaggaggaggccattgcaacctggagctgtacccggacttcatccgccacctctccaagttcatccgcgagatggagaacatcacaacgaagacaaggcttaagaagatccggcagtccctgcaacccgcacctaagaaggtccaccaccgggcgagcaccgggacgaccaccaccttcaccaccaactgctgctgccgcatccgggtccgcaaaccgagttgccgttgccctggctgcaacctaagctgcggctgctgctctggtctgatgagttgcttctcatcccggctgttcaagtgctcaacctgcttctcctcctgcagctgcaggggatgcttcaagtgcccaacctgcttctccttctcctgcagctgctgcaggagctgcctcaagtgcccaaccttcaaatgctgctgctgcggttcatgcagagatgagcaataa

SEQ ID NO: 376 - protein, 390 aa, Oryza sativa
  misc_feature (324)..(324): Xaa = any naturally occuring amino acid
  misc_feature (332)..(333): Xaa = any naturally occuring amino acid
MLSGCTVSSLAARFAFFPPEPATYAVRKDEACGGGGRLVASGVPRDAAVDVLLVDTRKGSKVVAFYLRNPAARLTVLYSHGNAADLGQLYDLFVQLKVNLKVNLMYDYSGYGASTGKPSEENTYADIEAVYQCLETEYGISQEDLILYGQSVGSGPTLHLASRLPRLRGVVLHSAILSGLRVVCHVNFTFCFDIYKLQNVKKIKKVKSPVLVIHGTDDDVVNWSHGNELWKLAREPYDPLWIKGGGHCNLELYPDFIRHLSKFIREMENITTKTRLKKIRQSLQPAPKKVHHRASTGTTTTFTTTAAAASGSANRVAVALAATXAAAAALVXXVASHPGCSSAQPASPPAAAGDASSAQPASPSPAAAAGAASSAQPSNAAAAVHAEMSN

SEQ ID NO: 377 - DNA, 711 bp, Oryza sativa
atgtgtggtggagagaagagggggaaacacacgcgcgcgctcgctcgcctggccgggccggcggcgcgcgcacgacgtacgtgtcgaatgctcggcaaaattggctcctcacccttgcgcagatgcagcctccttttgcagttttgttttgctgcgggattcggatttgttttgttttggaaacattccgaaaaatccgactactccatcccgctcgccggcgtgcactggcgatcgggagagcaggtctccggaacctctgcctttgacgtcctgcatcgggagaaggtggcaataaggtttttgggaagcgcttcgcgcgactgctccctgttcgtctgcgacggctcgccttcctctccgctcgcgtgcttcgcgacttcgtcgacgctcgcaaccgccagtagttcctgccgagcaaccggtctttccgccacctcgtgtgtcttacccgacaaatttgtggccgggtgcattattgcgaaactacctccatcatggagaagtttcggtattgcactcaaacacaagagacaggaatactccgttgaggggttgatagcgtctcttgatgttgaggagaaagctcgggaaaaagatgccgcgtctaaggacgatactgggcagtccagtgccaatgttgtgcacaaggcccagaacaagagcaaggggaaatgtaaagctcaacagaccaccaacttcaggaggtag

SEQ ID NO: 378 - protein, 236 aa, Oryza sativa
MCGGEKRGKHTRALARLAGPAARARRTCRMLGKIGSSPLRRCSLLLQFCFAAGFGFVLFWKHSEKSDYSIPLAGVHWRSGEQVSGTSAFDVLHREKVAIRFLGSASRDCSLFVCDGSPSSPLACFATSSTLATASSSCRATGLSATSCVLPDKFVAGCIIAKLPPSWRSFGIALKHKRQEYSVEGLIASLDVEEKAREKDAASKDDTGQSSANVVHKAQNKSKGKCKAQQTTNFRR

SEQ ID NO: 379 - DNA, 1152 bp, Oryza sativa
  misc_feature (332)..(332): r = adenine or guanine
  misc_feature (348)..(348): k = guanine or thymine
  misc_feature (372)..(372): r = adenine or guanine
  misc_feature (387)..(387): r = adenine or guanine
  misc_feature (429)..(429): s = guanine or cytosine
  misc_feature (434)..(434): r = adenine or guanine
  misc_feature (448)..(448): k = guanine or thymine
  misc_feature (450)..(450): k = guanine or thymine
  misc_feature (462)..(462): y = cytosine or thymine
  misc_feature (465)..(465): y = cytosine or thymine
  misc_feature (519)..(519): m = adenine or cytosine
atggggtgcgtgtcgtccaagatcctgagcaaatcagggagcttccaggagaaggtggtgagccatggattcaaggggagcaacctgatcgaggagatcatcctgtccacccccaagaagagcaacggcgatcagttcttggccctcctccgcacgtccacctcgtcggcgtcggcggcggcgagcagggccaaggacgccgccgatcagagcaccacggcggcggcggtggccgccgaggagtttgtcaagatcgagacgatcaacgtgtccgagctgctcgccgggctggaggaggaagaggaggaagaagaacgcgacgacggcaaaargttttcggctcaggcktgcgtgctcgatggccccgttgcracgccggcaagggcracgagctttcgcaccgtggaggatttcgacgcgctggtaacscggarcggctcgtcggagktkgcggaggcagcytcytccgccgatcaagacgcgacgggcgccaaaccgtcggagcaagaggaggccgcmaccgccgccgccgggaacaagaggcgggcgagggcgaggcagctcggcgagctgaaggtgccactgccaccggcgttcgacttctccaagtccggcagcctgcgcgactggctcctccagggcggacagatattctccccgggctcctacgtcacccccaagttcgggacgacctcaccggcgccttcgccgccgccgccgcaagaacgtggaggagtactccacaacgccggcgagccgcagccgcagcacaccgtgtttgatcccgagctggtcgcgcagttcgagcaagccatggagcggctgtccgaggacgaggagcgcgtcttggagaagatcctggaagccatgggagcggcggcggaggaggaggaggaggaggaagcgacggcgacggcgacggcgaggctggagatgccaagccatcggccggtgatggtggtgcaggagtaggcgacggttttgatcagatttggcgccgctcgtcgccgtcggggtagaggaggcaccatctgatatgcccccggggtggagccatagaggaccgcagcttaggcttggcagttgggggcttgaggcctcctgcctcggggctccggcagcatgggcgcaagaagaggaggtcgtcctgat

SEQ ID NO: 380 - protein, 153 aa, Oryza sativa
  misc_feature (53)..(53): Xaa = any naturally occuring amino acid
  misc_feature (62)..(62): Xaa = any naturally occuring amino acid
  misc_feature (67)..(67): Xaa = any naturally occuring amino acid
  misc_feature (95)..(95): Xaa = any naturally occuring amino acid
  misc_feature (97)..(97): Xaa = any naturally occuring amino acid
  misc_feature (101)..(101): Xaa = any naturally occuring amino acid
  misc_feature (142)..(142): Xaa = any naturally occuring amino acid
SQSRRLPDLEKSNAGGSGTFSSPSCLALARLLFPAAAVAASSCSDGLAPVASXSAEEAASAXSDEPXRVTSASKSSTVRKLVALAGVATGPSSTXAXAENXLPSSRSSSSSSSSSPASSSDTLIVSILTNSSAATAAAVVLXSAASLALLAAA

SEQ ID NO: 381 - DNA, 3780 bp, Oryza sativa
atggcagaaaatcaaggaatagaacaagtgatgggtaaattggtggacatgctagcgaaaaaatttagtgaggcctcaactacaagcaatgcaattatccctcatactgaatcaatactgaagattgagttaatgcaaaacgaaatcaagttgggtgtcaaaaattatttgagttggtcaaggagggcattactaatactaaaaacaaaggggttagaaggatatgtcacaggagaagtgaaggagcctgagaacacatcaagtgtagaatggaagacttggagcactaccaactctttagtggtggcatggttgttgacttcattaatcccagctattgctacaactgttgagactatctctagtgcgagtgagatgtggaaaactcttactaaactatactcaggagaaggtaatgtgatgctaatggtggaggcacaagagaagataagtgctttgagacagggggagcgctctgtggcagaatatgtcgcagagttgaagagtttgtggtccgatttagatcattatgatcctcttggattagagcactctgattgcatagcaaaaatgaagaaatgggttgagcgtagaagggttattgagttcttgaagggtctaaatccagagttcgaaggaagaagagatgcaatgtttcaccaaaccactcttcctaccttagatgaggccattgcagctatggcacaggaggagcttaagaagaaagtattgcctagtgccgcaccatgttcaccaagtcccacctatgcaattgtacaaggtaaagagactagagagtgcttcaattgtggtgaaatgggacaccttatgcgtgattgtcatgctccacgcaagcctacttatgggagaggaagaggtgttgatagaggtggaacaagaggtggaagaggctatgctggtaggagcaatagaggaagaggttatggatatagaggtgattacaaggctaatgcagttactctagaagagggttcttccgggactacacctgacaatgttgccaactttgctcattctacttcaggtagttttaatcaagcatttatgtctatgaacacttctcattcaagttggatattagactcaggtgcatccaggcatgtcactggcatgagtggagaatttacatcatataaaccatattcatttgcacacaaagagaccattcaaactgctgatggcacatcatgtcaggttaagggggagggcatagtgcaatgtactccatccattactttgtcatcagtgttatatgtcccttcttttccagtgaatttaatttcaataagttctcttgttgataatatggattgtcgggtttcccttgatcgtgagaattgtttaattcaggagagaagaacagggaagaaacttgggattagtatcaggcgtgatggactttggtacttggacagaagagggacaaatgaggatgtgtgtgcactaatggcttcaacaagtaaagaagtgactgaggtattacttttgcattgtcgactaggacatatatcttttgaaattatgagtaaaatgttcccggtagagtttagtaaagtggataaacatatgctgatatgtgatgcatgtgagtatgggaagcatactagaacatcatataatggagtggctgaaagaaaaaatcgccatcttttggagatagctcggtcactaatgtatactatgaatgtacctaaatttctatggagtgaggcagtaatgacggcagcttatctcatcaaccgcacaccatcaagaatacttggaatgaagacaccatatgagatgatatttgggaagaatgaatttgtggttccaccgaggaaggggtataagtgttggagtccatcagaacggcggacatttgtaagtatggatgttacgtttagggaatctgttccattctatggtgagaaaacagatataagctctttatttgttgatcttgatgatttaactagaggtgaccatgatcaacaaaaggaaggtgatcctgtacaagaacaagaatggagaaagccacatgaagaggaaaatcttcaagtttacacaaggagaatgagacttccaacaactcaacaagttgaagttgatgatcaagtatcagatgatcttactcatgtgcaagtgtcttcggagtcagggggagaacaaatagaaattagagaagaagaatcaaacttgccaattgccataagaaaggggatgagaagcaatgcaggcaaacctccacaaagatatggttttgaaattggagatgaaagtggtgatgagaatgatatagccaattatgtatcttacacttccttgtcatcgacatacaaggcctttgtggcatctctaaattcagctataattcctaaggattggaaagaggcaaagcaagacccaaggtggcatcaagcaatgctagatgaactagaagctcttgagaagaacaaaacatgggatcttgtatcctatcccaatggaaagaaagtggtaaactgtaagtgggtatatgcagtgaaacaaaatccggatggaaaagtggagaggtacaaagcaagacttgtggctaagggatatagccagacatatggaattgattatgatgaaacgtttgcaccggttgcaaaaatgagtacggtaagaactataatatcttgtgcagttaactttgattggccattacatcaattggatgtcaagaatgcttttctacatggcgatcttcaagaggaggtatatatggaaattccacctggatttgctactttgcaaactaaaggtaaagtattgagactgaagaaatccttatatggtctcaaacagtcgccaagagcatggtttgatcgatttaggcgtgcaatgtgtgctatgggctataaacaatgtaatggagatcacacagttttctatcatcatagtggagatcatataaccattcttgctgtttatgttgatgatatgattatcactggaaatgattgctcggagataactaggctgaaacaaaatctaagcaaagaatttgaagttaaggacctaggccagttgaaatattttctgggtattgaaattgcaagatctcctagagggatagttctttcacagcggaaatatgcattggacttgctcagtgacacaggtatgcttggatgtcgcccagcctctacaccagttgatcaaaatcataagttatgtgcagagtctggaaatccagtgaataaggaaagataccaaaggctggttgggagactgatatatttatgtcatacacgacctgacataacttatgctgtcagtatggtgagtcgatatatgcatgatccaaggagtgggcatatggatgctgtctataggatcttgagatatttgaaaggaagcccagtatcttggaggagcaagaagcaaccggtggtgtctcgctcaaccgctgaggcagaatatcgggcaatgtcagttgagtttgagaatcttctttctgagttgatgttgccggtggatactccaatgaaattgtggtgtgacaacaagtcagcaatcagcattgctaacaacccagttcaacatgatcgaacaaagcatgtggagttggatcgtttctttatcaaggaaaaactggatgagggagttttggaattagaatttgtaatgtctggtggacaagttgctgattgtttcacaaagggtttaggtgttaaagagtgtaatagttcatgtgacaagatgggtgctaagcttgttatttgggtatcgatcttgcaccgatcggcataa

SEQ ID NO: 382 - protein, 1259 aa, Oryza sativa
MAENQGIEQVMGKLVDMLAKKFSEASTTSNAIIPHTESILKIELMQNEIKLGVKNYLSWSRRALLILKTKGLEGYVTGEVKEPENTSSVEWKTWSTTNSLVVAWLLTSLIPAIATTVETISSASEMWKTLTKLYSGEGNVMLMVEAQEKISALRQGERSVAEYVAELKSLWSDLDHYDPLGLEHSDCIAKMKKWVERRRVIEFLKGLNPEFEGRRDAMFHQTTLPTLDEAIAAMAQEELKKKVLPSAAPCSPSPTYAIVQGKETRECFNCGEMGHLMRDCHAPRKPTYGRGRGVDRGGTRGGRGYAGRSNRGRGYGYRGDYKANAVTLEEGSSGTTPDNVANFAHSTSGSFNQAFMSMNTSHSSWILDSGASRHVTGMSGEFTSYKPYSFAHKETIQTADGTSCQVKGEGIVQCTPSITLSSVLYVPSFPVNLISISSLVDNMDCRVSLDRENCLIQERRTGKKLGISIRRDGLWYLDRRGTNEDVCALMASTSKEVTEVLLLHCRLGHISFEIMSKMFPVEFSKVDKHMLICDACEYGKHTRTSYNGVAERKNRHLLEIARSLMYTMNVPKFLWSEAVMTAAYLINRTPSRILGMKTPYEMIFGKNEFVVPPRKGYKCWSPSERRTFVSMDVTFRESVPFYGEKTDISSLFVDLDDLTRGDHDQQKEGDPVQEQEWRKPHEEENLQVYTRRMRLPTTQQVEVDDQVSDDLTHVQVSSESGGEQIEIREEESNLPIAIRKGMRSNAGKPPQRYGFEIGDESGDENDIANYVSYTSLSSTYKAFVASLNSAIIPKDWKEAKQDPRWHQAMLDELEALEKNKTWDLVSYPNGKKVVNCKWVYAVKQNPDGKVERYKARLVAKGYSQTYGIDYDETFAPVAKMSTVRTIISCAVNFDWPLHQLDVKNAFLHGDLQEEVYMEIPPGFATLQTKGKVLRLKKSLYGLKQSPRAWFDRFRRAMCAMGYKQCNGDHTVFYHHSGDHITILAVYVDDMIITGNDCSEITRLKQNLSKEFEVKDLGQLKYFLGIEIARSPRGIVLSQRKYALDLLSDTGMLGCRPASTPVDQNHKLCAESGNPVNKERYQRLVGRLIYLCHTRPDITYAVSMVSRYMHDPRSGHMDAVYRILRYLKGSPVSWRSKKQPVVSRSTAEAEYRAMSVEFENLLSELMLPVDTPMKLWCDNKSAISIANNPVQHDRTKHVELDRFFIKEKLDEGVLELEFVMSGGQVADCFTKGLGVKECNSSCDKMGAKLVIWVSILHRSA

SEQ ID NO: 383 - DNA, 1527 bp, Oryza sativa
atggttcaacccaataatgagcaactcaaccaacctctgcctttagaggtcagaagttatttgtgcatgctggaaatgatgcagcccttaaaattggcccttcataccatgggaatgtggcaattagatcgaatgatcttccatcttcaagtcgagtggcacaatattcaggtcatagagttaaaaacacaggaaccttacataactcctatgttcactatcctgctggaagctctggtggccatgtatcctacaatcctcaaactgaacctgttataacttatccacatagatctgagggagaatttgctcgagggagttcccaaatcgacaacagaactgctgcagtgaaacgaaaaaatcctgtcatttatccagagtatagcatcaatggtgatggttattgtgccggtagctcatcaagtacccagttctctaattatccacagccagctccattttctgagtccttgcatcgtcaaatgcctccaagtgttggcccaattaattggaatgaccagagcttggtaaatcaagaaggaagtcagagaaatgtgagggcacgtcataattttaataatatttcattggaacctagaccagtccattctacttcgaatgtttcccaaagtacatcaatgaaaaggaatggaccatccttttctacgcgaatgagaactatgccttcagaggtgcctctggaatgcactctggagaaatgccttacactatgggaagcagcaactcatctgttcctgtcccaactttacaaggctcttcaagcagtgcaatatttgccagtggtgtctttgcacctaggcatgttcatggtgacactgttcctagctacattcatctgccttctgtagcatcctctagctctacagcgattccccatgaggtgatcattccgagctaccaacctgctacctctgcaactacctcaacacccatgagggccagtcagccattacctgtcagagctgttgcatcttctagacatgcaaggaatgtactcatagggcatgctaacagcggaaggaacagaagggcgagaagctcatactatggtattcagcctttgatgattgatgcacagagcaattgataatgatgcaacaatttgctctccgcgaatcaagagaagcacaagacccccacagggccatgagactggacattgacaatatgagttatgagaggacctgctggctttgggagaatctattggtaatgtctgcacaggcttggtggacgagaaaatctcaggttgtgtgagagaagtgatctattgcagttctgatgaacagcaaaatgatcaagatgatgggaaatgtgcaatttgtctggggaggaatacaaagacaacagtttgctgggaatactgaaatgcaatcacgacttccacaccgactgcgtcaagaagtggttgaaggagaagaactcatgcccaatttgcaagtcggctgctgcataggacacgcgaggacaaacaacaatatggtcctcaaatttgttagtatttag

SEQ ID NO: 384 - protein, 493 aa, Oryza sativa
  misc_feature (16)..(16): Xaa = any naturally occuring amino acid
  misc_feature (231)..(231): Xaa = any naturally occuring amino acid
  misc_feature (368)..(368): Xaa = any naturally occuring amino acid
  misc_feature (401)..(401): Xaa = any naturally occuring amino acid
MVQPNNEQLNQPLPLXGQKLFVHAGNDAALKIGPSYHGNVAIRSNDLPSSSRVAQYSGHRVKNTGTLHNSYVHYPAGSSGGHVSYNPQTEPVITYPHRSEGEFARGSSQIDNRTAAVKRKNPVIYPEYSINGDGYCAGSSSSTQFSNYPQPAPFSESLHRQMPPSVGPINWNDQSLVNQEGSQRNVRARHNFNNISLEPRPVHSTSNVSQSTSMKRNGPSFSTRMRTMPSXGASGMHSGEMPYTMGSSNSSVPVPTLQGSSSSAIFASGVFAPRHVHGDTVPSYIHLPSVASSSSTAIPHEVIIPSYQPATSATTSTPMRASQPLPVRAVASSRHARNVLIGHANSGRNRRARSSYYGIQPLMIDAQXQLIMMQQFALRESREAQDPHRAMRLDIDNMSYXEDLLALGESIGNVCTGLVDEKISGCVREVIYCSSDEQQNDQDDGKCAICLGEEYKDNSLLGILKCNHDFHTDCVKKWLKEKNSCPICKSAAA

SEQ ID NO: 385 - DNA, 939 bp, Oryza sativa
atggcggctcgttgtccggtcggtgtggcctctgtgctgctgctgatcgtcttggtcacggtggcgtccgcggcgtctggcgcgcgatccggcggcggcggcggcgggggcatacgggagttgcggggcggcggcgcggggaggagggtggggggaaggacggaggtgagggacgtggagggggacagggaggtgcaggagctggggcgcttctccgtcgaggagcacaaccgccggcgccgcagccgggactgcggcgacgtccggctggagttcggcagggtggtcgccgcgcagcgccaggtggtgtccgggctcaagtactacctccgcgtcgccgccgccgaggagggcgccgcgggtcagaacggcggcgagccccgcgtgttcgacgccgtcgtggtggtcaagccctggctcgagtcgcgcacgctgctcacgttcgccccggccgcggactcgccgaacgagtccaagcgaaagtacaaaactatggcctccaagctgtattacgccgtcgccccgctcgtgctggtgcttctcctcctcgcgccgctctcgtccgcgcgcctcgccgccgccgccgccgccgacgacgacgggcagtggccggcgggcggcggccgcgggaggaaggtcggcgggaggacggacgtggaggacgtggaggggaacagggaggtgcaggagctcgggctcttctgcgtcgtggaacacaaccggcgaggggggtcggccacccgcggccgcgggctggtcttctccagggtcgtggcggcgcagacgcaggtggtctccgggatcaagtactacctccgcatcgctgcccaggaggccgacgacgagctggtgttcgacgccgtcgtcgtcgtcaaggcctgggtgccgtcccgcgagatggtctccttcgtgccggcggcggagctgccaggatactga

SEQ ID NO: 386 - protein, 312 aa, Oryza sativa
MAARCPVGVASVLLLIVLVTVASAASGARSGGGGGGGIRELRGGGAGRRVGGRTEVRDVEGDREVQELGRFSVEEHNRRRRSRDCGDVRLEFGRVVAAQRQVVSGLKYYLRVAAAEEGAAGQNGGEPRVFDAVVVVKPWLESRTLLTFAPAADSPNESKRKYKTMASKLYYAVAPLVLVLLLLAPLSSARLAAAAAADDDGQWPAGGGRGRKVGGRTDVEDVEGNREVQELGLFCVVEHNRRGGSATRGRGLVFSRVVAAQTQVVSGIKYYLRIAAQEADDELVFDAVVVVKAWVPSREMVSFVPAAELPGY

SEQ ID NO: 387 - DNA, 642 bp, Oryza sativa
atggcagccaccaccggctattgccgatctccctcaccggagcattgccggccaaaccctcgcgccaccgggcttgcctcgatgagccgtcctataagccactatagccacttcttttaccggccggagcaagctcttgccgccgccgttccggcttcatctctcacttccactgctgacctctgctgtacccggatgcgcgtcgacggggaacacgttatgccaccggcgtcgccgtgttttggccaccggagggccggcgccccgctcgtcctctcttctccctctctcgctgccaacagaagaggagaagaaagaagacgggaggaagaagaaggagaagaaaaagaaaaagaaagactgacaggccccgacatcaaaccgttggttgtaaagtccggcaaaacccaaacccaaggtcgaagtgttgttcctggcaccccacgccttcatacgtataacggtcggagcttcactattccctcgaccttcatagcacgccgcacagttagctctctggctctgtgtgatcctagccgctccgtcgccactcatggttgtcggagtaacacttccaccccactaaacctacacaaatctcctattcctctagtccttatcctttctgttgacaccggctag

SEQ ID NO: 388 - protein, 213 aa, Oryza sativa
MAATTGYCRSPSPEHCRPNPRATGLASMSRPISHYSHFFYRPEQALAAAVPASSLTSTADLCCTRMRVDGEHVMPPASPCFGHRRAGAPLVLSSPSLAANRRGEERRREEEEGEEKEKERLTGPDIKPLVVKSGKTQTQGRSVVPGTPRLHTYNGRSFTIPSTFIARRTVSSLALCDPSRSVATHGCRSNTSTPLNLHKSPIPLVLILSVDTG

SEQ ID NO: 389 - DNA, 606 bp, Oryza sativa
atgcatggcagcgatagatggcggcgggagcaggttggactggcgacccgatggtggcctagatcgggtagccccggcgaatcgtcaacggcggcgggcgcggcagtctggatgcgacggctgcgctgcattggcggcggcggcgattcgtcggcgacggcgggtatggctgtctggatgcgacggctgtgctgcatcggtggcggtggcgattcgtcagggtcggagggcaacggcctcgatgcgacggcggcgctgcatcggcgggaggccggcgatggttggatgccgatgaaactgatgaaattcaaggataagcgagcaaccctcacaactggatggaatgctttgagtccacaccagatggtggaaaagatgccggagtcttcggggtggctacgacggtggatgggacggggtggaggcggcgatgttgatgcgcctgcgacggcggatgcggcgggtggagacggcgacgtctatgcggcggcgttgaagccacggcggccgtggcgtggtcgatgcgacggctgctcggcggcctcgatgcgacggcggctgcggcggcctcgatatgacagcggcagacgcgtgtgcgacgcatag

SEQ ID NO: 390 - protein, 201 aa, Oryza sativa
MHGSDRWRREQVGLATRWWPRSGSPGESSTAAGAAVWMRRLRCIGGGGDSSATAGMAVWMRRLCCIGGGGDSSGSEGNGLDATAALHRREAGDGWMPMKLMKFKDKRATLTTGWNALSPHQMVEKMPESSGWLRRWMGRGGGGDVDAPATADAAGGDGDVYAAALKPRRPWRGRCDGCSAASMRRRLRRPRYDSGRRVCDA

SEQ ID NO: 391 - DNA, 1677 bp, Oryza sativa
  misc_feature (36)..(36): r = adenine or guanine
  misc_feature (125)..(125): r = adenine or guanine
  misc_feature (372)..(372): m = adenine or cytosine
  misc_feature (678)..(678): y = cytosine or thymine
  misc_feature (708)..(708): y = cytosine or thymine
atggcagtggaagaaagtgacttggcaagagcaacrgaaacacttgataagcagtgggcagagatggccaagacatccacagcagcaggaggtaatgaaacaactcaagaagaaagaattgctgrtgcggtggtggaagaaacagggaaaacacccatgagtgatgtagagcttgctgaattggtccaagcgcaaggggctgtcatggtgagtaaaggacaatatgaggaattgcaaaaagagttacaaagattgcaaaccctacacaatcagacagtaggagcaggagggtcaagtgatcagtgtgcaatactaggggctagggaaaagcaatcagatcaggcaaaaggagatgcccagggggagaacaamgaaggagaaagtatcaaagccacccaagctcaagatctaccacgaacccaagctcccagtcaagtacaaaacccatctcaggctcaaattcccattcttacccagaatacacctcaagctcaaattaccattcctactcagaacctagctcaaaccttgatccctagccaaaaccaaattcctattcaaacgcacatttctttccagccgcatattccaattcaaactcaaaatcctaaccaagtacaatatcctcaaacacaattacatcaagcccacccagttcttcccaatcaaatccaaatyccccaacctcatatcctacaaagtaatatyccacgaacacaacccccacaaaatgatacaccacaaatacaagttccacaaacccaaataccacagattcaaacatctttgcccaacttcacacatacgcaatcaacaaacactcaagcagctcaaaaccatcaccaagtcccccaaggtttttcccttttccatatgcaacaaccagagatgatgtttgaacaagggtacatcccacaaatggccaaccatatacaatatgcaggtcaaataccgaaccaagcctttcaattccagcccacacaaccctattttcaaccaaccagagcaatagatacaaagaatcccttaagtcaaaacctgcaaatggcaccttggccaataaacttcaagttgtccaacatcacaaagtacaaaggagacacagatcccaatgaatacctcagagtatatgagacagcagttgaagcagcaggtggagatgataccacgaaagctaagatactcccaacaatgctagaaggagtagcattatcatggtacactaccattccaccaatgacaatctattcatgggaacatatgagagacacctttcgagcaggattcattggggcgtatgaagaaccaaaagaggcagatgacttgtatgccatgaagcagcttccaggggaaacattgagaagtttcatcgtgaagttttcaagggtaagatgtcagatcaggcatgtagatgatgaaatgctcatagcggcagcaaaaagggcattgctacccggtcctcttcgttttgatcttgctagaaatagaccaaagacagcaaaagacttgtttgaaagaatggaaagttttgcaagaggagaagaagatgagttgagagtgcaagaggaagaagccgtcttgttggggaaaaaagcagtcaaagaacaagcaaatttcccaaggggaagaacaaaagggagagaataccggaaagccctggaaaaagttcaagtatga

SEQ ID NO: 392 - protein, 558 aa, Oryza sativa
MAVEESDLARATETLDKQWAEMAKTSTAAGGNETTQEERIAAAVVEETGKTPMSDVELAELVQAQGAVMVSKGQYEELQKELQRLQTLHNQTVGAGGSSDQCAILGAREKQSDQAKGDAQGENKEGESIKATQAQDLPRTQAPSQVQNPSQAQIPILTQNTPQAQITIPTQNLAQTLIPSQNQIPIQTHISFQPHIPIQTQNPNQVQYPQTQLHQAHPVLPNQIQIPQPHILQSNIPRTQPPQNDTPQIQVPQTQIPQIQTSLPNFTHTQSTNTQAAQNHHQVPQGFSLFHMQQPEMMFEQGYIPQMANHIQYAGQIPNQAFQFQPTQPYFQPTRAIDTKNPLSQNLQMAPWPINFKLSNITKYKGDTDPNEYLRVYETAVEAAGGDDTTKAKILPTMLEGVALSWYTTIPPMTIYSWEHMRDTFRAGFIGAYEEPKEADDLYAMKQLPGETLRSFIVKFSRVRCQIRHVDDEMLIAAAKRALLPGPLRFDLARNRPKTAKDLFERMESFARGEEDELRVQEEEAVLLGKKAVKEQANFPRGRTKGREYRKALEKVQV

SEQ ID NO: 393 - DNA, 402 bp, Oryza sativa
atggacgtgggccgaacgagcacgggaaaaaacaagtcggtctacacgtacaaatccattattaattttgcaaagagggcaagccaaaaggcgtctttgcgctcgaatggcatctcctgcgtcaaccaaggatcttaatttagaggcagagtacatgtcttcagctcatgtgaggacaaagggaagagaatttggaggcaaacggaagaaagttggagctgggagccagagtggtaaagcaggtggtcttctgctagaacgatggcaaggccttcagttcagtcttctctccccagcccttctgcgctggcctctgcgaagatgacttggtttcagctttgctggacatttttcccctctcttaacatcttttgtttttctctctccagtttctgcttgtaa

SEQ ID NO: 394 - protein, 107 aa, Oryza sativa
WTWAERAREKTSRSTRTNPLLILQRGQAKRRLCARMASPASTKDLNLEAEYMSSAHVRTKGREFGGKRKKVGAGSQSGKAGGLLLERWQGLQFSLLSPALLRWPLRR

SEQ ID NO: 395 - DNA, 345 bp, Oryza sativa
  misc_feature (145)..(145): y = cytosine or thymine
atgatgatgaccgaggtcgccaatcacagcaaaaggaaccacaatgaaagctacttcaccgggaaagcagcagtcaccagcagctcggaggagtttgggagcatgacatccaagaagccgaggaacacaagcccgagagacgctyccacggacactgcttctgttcttcaggaggcctcagggtacatcaagtttcttcaccagcagctcgaggatcccgaccactacagcctgaggaaccgtggcctctgcctggttccagtggaccagacgctgcagctgacgcagagcaacggcgccgacctgtgggcgccggcgaacacgaccaggcgcaggtcggtgtga

SEQ ID NO: 396 - protein, 113 aa, Oryza sativa
MMMTEVANHSKRNHNESYFTGKAAVTSSSEEFGSMTSKKPRNTSPRDATDTASVLQEASGYIKFLHQQLEDPDHYSLRNRGLCLVPVDQTLQLTQSNGADLWAPANTTRRRSV

SEQ ID NO: 397 - DNA, 506 bp, Oryza sativa
atggcggcggcggccgtcggcgtgctgctgccgttcccgttctactgggcgctctggaaccacccgcagcggtgggtcgacctgtgcggcggaggcggcggcggcgtggacccgtgccgccggatggcgcaggtgtcccacgtcctcaaggcgctgcagctcctcgccctcgcctccgtcgcctccttctcctggccgccgccgctctactccgtcgccctcctcgccgtcggccagtacctcaatttcaattcagggtgtaccagctgctcggtgagccaggcacctactacggtgttcgatttggaaagaaaatcccatgggtgacagaatttccatttggttatatcaaagaccctcaatatgttggcagcatgctcagccttgtggcactgctttgttgggttccattccaatatgttcttctctggtgcctcggctacgttttcatgatgtgggtggaaagcaaggaagatcctgccactcgtgccaagctgctctcctga

SEQ ID NO: 398 - protein, 91 aa, Oryza sativa
WRRRPSACCCRSRSTGRSGTTRSGGSTCAAEAAAAWTRAAGWRRCPTSSRRCSSSPSPPSPPSPGRRRSTPSPSSPSASTSISIQGVPAAR

SEQ ID NO: 399 - DNA, 813 bp, Oryza sativa
atgacggccggcgacgaagaagcgacggcggcggcggcctgcacggtggcgacggctctacggaatacgacctacatgtctcccacatcttcggcggatccacgttgtactcctctaagagggagtacaagaaagcggaacgcgaagtctgctccacctcacgacgactactaccaagatgaagtggtcccaacacaagatcgagttctcggaagcggatcatcccaagatcgcgaacccaccattcggaacataaaggtggtgagagttctcatcgacggcgggagctcaatcaatctgctcttcgctagcactttagacgcggtgggaatacctcgaagcgagctgacgcccacacatcagcccttccatggaatcacccccgagtcgtcgtctaaacaattgggaaaaatcacgctacctgtcaccttcggacacgccgaaaacttccgaacaaagcagatcacctttgatgtcgcagagttcgataccgcatacaatgccatcattgggagaactgcactcgcgaagttcatggcggcatcgcattacacataccaagtgctaaaaatgccaggaccaaaagggacaatcactatcctggctaacaccaagttggcggtacagtgcgacaagcggagccttgacatagtcgagcatactctcaacccgcccgccacagccgagaaccccaagaaagtgagcaagcccaagaagactccaaaaccagatggtgcaatcaagataatcccgttgtcaagctccaaccccgacaaaaccgtcaagatcagggcatcactggaggacaaatag

SEQ ID NO: 400 - protein, 270 aa, Oryza sativa
MTAGDEEATAAAACTVATALRNTTYMSPTSSADPRCTPLRGSTRKRNAKSAPPHDDYYQDEVVPTQDRVLGSGSSQDREPTIRNIKVVRVLIDGGSSINLLFASTLDAVGIPRSELTPTHQPFHGITPESSSKQLGKITLPVTFGHAENFRTKQITFDVAEFDTAYNAIIGRTALAKFMAASHYTYQVLKMPGPKGTITILANTKLAVQCDKRSLDIVEHTLNPPATAENPKKVSKPKKTPKPDGAIKIIPLSSSNPDKTVKIRASLEDK

SEQ ID NO: 401 - DNA, 1500 bp, Oryza sativa
atggcgagttccgttttctctcggttttctatatacttttgtgttcttctattatgccatggttctatggcccagctatttaatcccagcacaaacccatggcatagtcctcggcaaggaagttttagggagtgtagatttgatagactacaagcatttgaaccacttcggaaagtgaggtcagaagctggggtgactgagtacttcgatgagaagaatgaattattccagtgcacgggtacttttgtgatccgacgtgtcattcagcctcaaggccttttggtacctcgatacacaaatattcctggcgtggtctacatcatccaagggagaggttctatgggtttaaccttccccggttgccctgcgacttaccagcaacaattccaacaattttcatctcaaggccaaagtcagagccaaaagtttagagatgagcaccaaaagattcatcaatttaggcaaggagacattgttgcactcccagctggtgttgcacattggttctacaatgatggtgatgcacctattgttgccgtatatgtttatgacgtaaacaacaacgccaatcagcttgaacctaggcaaaaggagttcctattagccggcaacaacaatcgggctcaacaacaacaagtatatggtagctcaattgagcaacactctgggcaaaacatattcagcggatttggtgttgagatgctaagtgaggctttaggcatcaacgcagtagcagcaaagaggctacagagccaaaatgatcaaagaggagagatcatacatgtgaagaatggccttcaattgttgaaaccgactttgacacaacagcaagaacaagcacaagcacaagatcaatatcaacaagttcaatacagtgaacgacagcaaacatcttctcgatggaacggattggaggagaacttttgcacgatcaaggtgagagtaaacattgaaaatcctagtcgtgctgattcatacaacccacgtgccggaaggataacaagtgtcaatagtcagaagttccccatccttaacctcatccaaatgagcgctaccagagtaaacctataccagaatgctattctctcgccgttctggaacgtcaatgctcatagtttggtctatatgattcaagggcgatctcgagttcaagtcgttagtaactttggaaagactgtgtttgatggtgtccttcgcccaggacaattattgatcattccgcaacattatgctgtcttgaagaaagcagagcgtgaaggatgccaatatatcgcaatcaagacaaacgctaacgccttcgtcagccaccttgcagggaaaaactcagtattccgtgccttgccagttgatgtagtcgctaatgcgtatcgcatctcaagggagcaagcccgaagcctcaagaacaacaggggagaagagcacggtgccttcactcctagatttcaacaacaatactacccaggattatcgaatgagtccgaaagcgagacctcagagtaa

SEQ ID NO: 402 - protein, 499 aa, Oryza sativa
MASSVFSRFSIYFCVLLLCHGSMAQLFNPSTNPWHSPRQGSFRECRFDRLQAFEPLRKVRSEAGVTEYFDEKNELFQCTGTFVIRRVIQPQGLLVPRYTNIPGVVYIIQGRGSMGLTFPGCPATYQQQFQQFSSQGQSQSQKFRDEHQKIHQFRQGDIVALPAGVAHWFYNDGDAPIVAVYVYDVNNNANQLEPRQKEFLLAGNNNRAQQQQVYGSSIEQHSGQNIFSGFGVEMLSEALGINAVAAKRLQSQNDQRGEIIHVKNGLQLLKPTLTQQQEQAQAQDQYQQVQYSERQQTSSRWNGLEENFCTIKVRVNIENPSRADSYNPRAGRITSVNSQKFPILNLIQMSATRVNLYQNAILSPFWNVNAHSLVYMIQGRSRVQVVSNFGKTVFDGVLRPGQLLIIPQHYAVLKKAEREGCQYIAIKTNANAFVSHLAGKNSVFRALPVDVVANAYRISREQARSLKNNRGEEHGAFTPRFQQQYYPGLSNESESETSE

SEQ ID NO: 403 - DNA, 468 bp, Oryza sativa
atggcgacggtggccggcgacgatggcggcggcggcggtgagttctacctgcggtactacgtggggcacaaggggaagttcgggcacgagttcctggagttcgagttccggcccgacgggaagctccggtacgccaacaactccaactacaagaaggacaccatgatccgcaaggaggtgttcgtctccccctccgtcctccgcgaggccaccaggatcatccacgaatccgagattatgaaggaggatgacagcaactggccggagccagaccgcgtgggaaggcaggagctggagatcgtgatggggaacgagcacatctccttcaccacctccaagatcggctccctcgtcgacgtccagaccagcaaggaccccgagggcctccgcatcttctactacctcgtccaggtccctctacccaccctttgcctctcacaaatcactcaaggatccattgctagctag

SEQ ID NO: 404 - protein, 155 aa, Oryza sativa
MATVAGDDGGGGGEFYLRYYVGHKGKFGHEFLEFEFRPDGKLRYANNSNYKKDTMIRKEVFVSPSVLREATRIIHESEIMKEDDSNWPEPDRVGRQELEIVMGNEHISFTTSKIGSLVDVQTSKDPEGLRIFYYLVQVPLPTLCLSQITQGSIAS

SEQ ID NO: 405 - DNA, 846 bp, Oryza sativa
atggataacgccaaatcatggcttgtctggctccaaagctctagctggttctggaccattatctttcagtttcttcccaacgtcctcatttttgtgagcatgtatattatcatcccatcagtgctgtcttacttctccaagtttgagtgtcatctgacagtgtcgggagagcagagggctgcattgttgaagatgtgtgattgcaagcagattgaacaatacttaagcccctcttttttgtcaagatcttcactctcctccctggcattcttgatcacatgcacctttctaggaatatcctttgatctgttggctccaatcccttggataaagcatgtaatgaagaaatttagaaagaatgatatggtccagttggtccctgaagaaaatgaggactaccaactgatgcatgatggcgaagaaacaaataatttgagagcgcctctaatgtctgagagagaagacagtggcattctgaatggtattgaggagcatgatctttcattgtacccgataaacaggagcttccatatgccaaagcagacatttgactttgcacaatactatgcatttgacattacaatattcgcgctcacaatgatctactcactgtttgctcctctgacagttcctgtcggcgcagtatactttggctaccgataccttgtggacaagtacaatttcctgtttatctacagagttagagggtttcctgcaggcaatgatgggaagctgatggacatggtgatctgcatcatgcaattctgcgttattttcttccttgttgcaatgttactattctttgcagtccaagccatccttgttggaagggatgcagacagttaa

SEQ ID NO: 406 - protein, 281 aa, Oryza sativa
MDNAKSWLVWLQSSSWFWTIIFQFLPNVLIFVSMYIIIPSVLSYFSKFECHLTVSGEQRAALLKMCDCKQIEQYLSPSFLSRSSLSSLAFLITCTFLGISFDLLAPIPWIKHVMKKFRKNDMVQLVPEENEDYQLMHDGEETNNLRAPLMSEREDSGILNGIEEHDLSLYPINRSFHMPKQTFDFAQYYAFDITIFALTMIYSLFAPLTVPVGAVYFGYRYLVDKYNFLFIYRVRGFPAGNDGKLMDMVICIMQFCVIFFLVAMLLFFAVQAILVGRDADS

SEQ ID NO: 407 - DNA, 3342 bp, Oryza sativa
atgtcgtcgctcagccgggagctcgtgttcctcatcctccagttcctcgacgaggagaagttcaaggagaccgtgcacaagcttgagcaagagtcaggattcttcttcaacatgaagtactttgaagagaaggtccatgctggggagtgggatgaagtggagaaatatctttcaggtttcaccaaggtggatgacaataggtattctatgaagatattctttgagatcagaaagcagaagtatttggaagcacttgacaggcatgatagagcaaaggcagtagatattcttgttaaagatcttaaagtcttctcgacattcaacgaggagttatataaagagataacacagcttctaactcttgagaatttcagggaaaatgaacagctgtctaagtacggggataccaaatctgctcgcagtataatgctgattgagctcaaaaaacttattgaagcgaacccccttttccgggaaaagcttgttttcccaactctcaaggcatcacgccttcggactttaatcaaccaaagcttgaactggcagcatcagctttgtaagaatcctcggccaaatccagatatcaagactttgttcactgatcatacctgcactccgccaaatggagctcgtgcttcaccagtttctgtaccactggcagcggttccaaaggccggtggcacatacccaccacttacagctcatactccatttcaacctcctcctgctggtccatctttagcgggttggatggcaaatgctgctgctgctacatcatctgttccatgtgctgttgtggcggcatcatcactacgtgttccgccaaatcaagctgtcccaatcatgaaacgaccaactataacagactatcaaagtgcagaatctgagcaactaatgaagcgattgaggccaagtggacatggtgttgatgaggccacctatcctgcaccaattccccaacctttatggtcagtggaggatcttcccaggacagtagcttgtacattgtcacagggatctagtgtaaccagcatggattttcatccaactcggcatacactattactagttggatctaccaatggtgaaattacactttgggaggttggtatgcgtgagagactgttttcaaagcccttcaaaatttgggacattcaagcttgttcaccacaatttcaggtttcctttgtggtttcaggtgtcgcatttgcaaaacatttgattcatctgcatgcatatcagcaaccaaatgagacgcggcaagttctagagattgacgctcattctggagcagttaatgacatagcattctcccggccaaataagcaactttgtgttgtcacttgtggagatgataggctgataaaggtctgggatatgcatggacagaaactgttttcatttgaagggcatgaggcaccagtgtattccatctgccctcaccacaaagagagtattcagtttatcttctcaacctccctcgacgggaaaattaaggcatggctttatgatcatatgggatccagggtagattatgatgctccaggaaaatggtgtactactatgctttatagcgctgatggaactaggttgttctcatgtggaacaagtaaagatggagattcatatttagttgagtggaatgaaagtgaaggatctatcaagaggacatattctgggtttcgtaaaaagtcagctggtgttggtgtggtgcagtttgacacagctcagaatcacattttggctgctggtgaagataatcagattaagttctgggatgttgataatacaaccatgcttagctctactgaagctgacggaggcttaccgggtcttccacggttgaggttcaataaagaaggcaatcttcttgctgttactacagtggacaatgggtttaagatacttgcaaatgctgatggactcagaactttacgagcatttggaaaccgacctttcgaagcatttagatcgcaatatgaagcttcttctatgaaggtctctggtgctcctgttgttgcgggcatttctcctaatattggtcggatggatcacatcgacaggaattctcctgcaaagccatctcctataatgaatggtggtgatccagcatctagaagcatcgatataaagcctagaatttcagaagaaaggcccgataaagcaaaaccctgggagctgatggaagtcctaaatgctcagcaatgccgtgtagctacaatgccagaaactccagaccaagccagcaaggttgtcagacttctgtacacaaattctggtgttggcttgctagcacttggttccaatgccattcaaaggctgtggaaatgggctcggaatgatcaaaatccaagtgggaaggccacagccaatgtagtgccacaacattggcaaccaaacagtggtcttgtcatgcaaaatgatacagcagataccaatcctgaggatgcagttccatgcattgctctctccaagaatgattcttatgtgatgtctgcatgtggtgggaaggtttcactgtttaacatgatgacatttaaggtgatgacaacattcatgccaccacctccagcatcaacctttttagcatttcaccctcaagacaataatatcatagcaattggaatggaagattcaaccatccatatatacaatgtcagggtagatgaggtcaaaactagattgaaagggcatcaaaggaggataactggtttggccttctcaaacaacctacaaatacttgtgtcttcaggggctgatgcacagctttgtgtgtgggccaccgatacttgggaaaagaaaaaatctgttgctattcaaatgccagctgggaaaactccatcaggggatacttgggtccagtttaactctgactggagtcgtttgttagtagtacatgagactcagctagctatatatgatgcatcaaaaatggaaagaatctaccagtggatacctcaggacgctttgtcagctcccatttcacatgcatcatactcacgcaacagccagttggtttttgctgcctttaccgatggtaacataggaatttttgatgtggagaacttgagattaagatgccgaattgcacctccagcatacttatcttctgcagccataaacagcaatccatcggtctaccctcttgtcgtcgctgcacatccacaggagtcgaatcaatttgcggttgggctttcagatggatctgttaaagtgattgaacccttggagtccgaagggaagtggggaacgacgcctcccacggaaaacggggtgcccaatggcaggacgtcaacatcatcagcaactagcaacccagctgcagaccaaatccaaagatag

SEQ ID NO: 408 - protein, 1113 aa, Oryza sativa
MSSLSRELVFLILQFLDEEKFKETVHKLEQESGFFFNMKYFEEKVHAGEWDEVEKYLSGFTKVDDNRYSMKIFFEIRKQKYLEALDRHDRAKAVDILVKDLKVFSTFNEELYKEITQLLTLENFRENEQLSKYGDTKSARSIMLIELKKLIEANPLFREKLVFPTLKASRLRTLINQSLNWQHQLCKNPRPNPDIKTLFTDHTCTPPNGARASPVSVPLAAVPKAGGTYPPLTAHTPFQPPPAGPSLAGWMANAAAATSSVPCAVVAASSLRVPPNQAVPIMKRPTITDYQSAESEQLMKRLRPSGHGVDEATYPAPIPQPLWSVEDLPRTVACTLSQGSSVTSMDFHPTRHTLLLVGSTNGEITLWEVGMRERLFSKPFKIWDIQACSPQFQVSFVVSGVAFAKHLIHLHAYQQPNETRQVLEIDAHSGAVNDIAFSRPNKQLCVVTCGDDRLIKVWDMHGQKLFSFEGHEAPVYSICPHHKESIQFIFSTSLDGKIKAWLYDHMGSRVDYDAPGKWCTTMLYSADGTRLFSCGTSKDGDSYLVEWNESEGSIKRTYSGFRKKSAGVGVVQFDTAQNHILAAGEDNQIKFWDVDNTTMLSSTEADGGLPGLPRLRFNKEGNLLAVTTVDNGFKILANADGLRTLRAFGNRPFEAFRSQYEASSMKVSGAPVVAGISPNIGRMDHIDRNSPAKPSPIMNGGDPASRSIDIKPRISEERPDKAKPWELMEVLNAQQCRVATMPETPDQASKVVRLLYTNSGVGLLALGSNAIQRLWKWARNDQNPSGKATANVVPQHWQPNSGLVMQNDTADTNPEDAVPCIALSKNDSYVMSACGGKVSLFNMMTFKVMTTFMPPPPASTFLAFHPQDNNIIAIGMEDSTIHIYNVRVDEVKTRLKGHQRRITGLAFSNNLQILVSSGADAQLCVWATDTWEKKKSVAIQMPAGKTPSGDTWVQFNSDWSRLLVVHETQLAIYDASKMERIYQWIPQDALSAPISHASYSRNSQLVFAAFTDGNIGIFDVENLRLRCRIAPPAYLSSAAINSNPSVYPLVVAAHPQESNQFAVGLSDGSVKVIEPLESEGKWGTTPPTENGVPNGRTSTSSATSNPAADQIQR

SEQ ID NO: 409 - DNA, 1101 bp, Oryza sativa
atggcagactcctcgttcaatccggagtttctgcaagcacatgcagagctttggaatctcacctttagctacctgaaagccatggcgcttgagtgtgctatcaagcttgggatccccaacgccattcatcgttgtggtggttctgcctcactatcggaactggtcatctccattccagtgcctgagactagaaagcctcatctgcctcgcctcatgaggtttcttgccgcggtaggtgttttttccctcgataacccaactattgatgaagaggtgaccgagaaaggcatgggcatataccgcctcacaccattgtctcgcctccttgtggatggtagcatcggtgggcatggaagcctctctccgtttgtgctctcccaaaccaccaagtatcatgtgtctgcagctatgaatctatctgactggttcatgactgaggacaaagaggttgccatagagatgccatttagggctgctcatggcacagacttgtggggtgttatgagtcgtgatgctaacatgaatgaggtgttcaatgctggcatgggttccgatagtcgtcttgcaatcaattttattattagcaaatgtggtgaggtgtttgaggggattagctcattggttgatgttggtggtggtactggcacaacagcaagagacattgctaaggctttcccacatatcaagtgctcggtactggatcttccaaatgtaatcgatactatcacggtggatggcataattgagtatattgcaggtgacatgatggaacaaatcccaccaactgatgccgtgctgctcaagtatattctacatgactggaacgatgaggattgtgtaaagatcctaaaacaatgtagaaatgctattcatgctcagaaaccaggaggaaaagttattatcatagacatagtggttggatccccttctaaagacatgtttgaagctcaagtttcatttgatctattgatgatggtgataacatcaggcaaggaacgtgatcagcatgaatggcataagatattcatggatgcgggatttagtcattacaagacaaggcctgttttggggtttttggccatcactgagctctatccgtag

SEQ ID NO: 410 - protein, 366 aa, Oryza sativa
MADSSFNPEFLQAHAELWNLTFSYLKAMALECAIKLGIPNAIHRCGGSASLSELVISIPVPETRKPHLPRLMRFLAAVGVFSLDNPTIDEEVTEKGMGIYRLTPLSRLLVDGSIGGHGSLSPFVLSQTTKYHVSAAMNLSDWFMTEDKEVAIEMPFRAAHGTDLWGVMSRDANMNEVFNAGMGSDSRLAINFIISKCGEVFEGISSLVDVGGGTGTTARDIAKAFPHIKCSVLDLPNVIDTITVDGIIEYIAGDMMEQIPPTDAVLLKYILHDWNDEDCVKILKQCRNAIHAQKPGGKVIIIDIVVGSPSKDMFEAQVSFDLLMMVITSGKERDQHEWHKIFMDAGFSHYKTRPVLGFLAITELYP

SEQ ID NO: 411 - DNA, 1911 bp, Oryza sativa
atggacgcgcagtgccgcagcaagattggtctgtcggtttccacagctcaggaagccgacgtacgagaaggatgtatggtagactcgctcacagttaaaagcgcgggagtagttaacaagctcgctagctcaatgccggccggcctgctccaccacaggcgcaaccggagccacaactttaggttgcagctcagacagcccgagaatgcaaccgacgacacggacgaggcgaacaccaacaacagcagcagcagcagcagaaccaacggtctaacacccgacaccacaggcgacggctgggaaccaggacgaaaccctaatcttcacttccctttatcttctcttcaggacggaggaactatatatatttatatagagcaaggagtccagctgcccagcagcacaacaatccgcttccactcgggaagcctagtctatgatgcccgcagacatcccgaatcacacagattcgtttctgaccactcagaggggtacactttacccacaagacacgaacttactccagacactggccggtgtcagaggaatcggtccttatatgcgaatacgggacagtgccacataggcacaacccccgcatcgcgagttttcacaattcattttattttcaaacacaccgacaccacatgtcgggttttgaaggcttcacaaacccatttcccaagttttcgacaagcaacggtgtatgtgggatatttggtatacgcgctcagagagcacgaataccgaggtaccacaagggtggagcgacaaggaatcagggtaatacgacctacggaaattagtgcgactactggaaaagagaaatatgtgtggagtattgaaaaagatattcccaagaatatctttgactcattgacacgtggggccaataagaaggccgaggaggagggtggctactgggccaagcccaagagcaagagagagggggcggctgctgactgggcgtcggctgacttggtcaagtggggccgacggctgagacgacgcgcgacgacggccggcggcggcggccaatctcgccgacacgccaacgtggccgcacgcgagaagagcgaagggcacgcgggctcgggcttcgccgaaccggaatccgtttccggtgtcggatggggcggagaagcactgaggagggccggcgacgagcagcggcctccgggagcggacggtaatggcggtgaggccatgccgggcgacggcggtgctagggaatggtttggggaggtcctagggagctcaaggacggtgttggcgagggtggtcgacgagctggggcccgacgacggcgcgcgactgcgcgcggcggcggaaacagagcaacggcgaggcgcgcggcgcatcgtgcggcaggctatggcgtgcggcggcgggcgcggcatagcgagcggtaggaggaaagggttcggcggggagctcaccgacaagaggaagcggcgtcggcggatcggagggagtcatggtgaggtggtcgcgacggtgggacggaacggcaccgggtgggcgcggccggggaggaagagaggagaggtggcgcccggagctcctcgtcacgcgcccacgcacgcaccggttcctccggtgctcggcggcggacggcgacgacgagatcgagtcgagcggcaacagggcggcgacggttgttcggctacaatggcgcggcgcgggatgtggagcttcgaggggaaggaaccgagcacgggcgatcaaggagaggcggtggcggactcgcggtcaagttgtgacagaggcggtcacgggtggcaaaggagtgcgttgtgggctgtggccaccatcggtgatgcgccgccaccgatcgaacccaagcaacgtgaagtcaagaaggtcgaaggcacagtgcaccgcctcctcagggaaccccttggtttgtag

SEQ ID NO: 412 - protein, 636 aa, Oryza sativa
MDAQCRSKIGLSVSTAQEADVREGCMVDSLTVKSAGVVNKLASSMPAGLLHHRRNRSHNFRLQLRQPENATDDTDEANTNNSSSSSRTNGLTPDTTGDGWEPGRNPNLHFPLSSLQDGGTIYIYIEQGVQLPSSTTIRFHSGSLVYDARRHPESHRFVSDHSEGYTLPTRHELTPDTGRCQRNRSLYANTGQCHIGTTPASRVFTIHFIFKHTDTTCRVLKASQTHFPSFRQATVYVGYLVYALREHEYRGTTRVERQGIRVIRPTEISATTGKEKYVWSIEKDIPKNIFDSLTRGANKKAEEEGGYWAKPKSKREGAAADWASADLVKWGRRLRRRATTAGGGGQSRRHANVAAREKSEGHAGSGFAEPESVSGVGWGGEALRRAGDEQRPPGADGNGGEAMPGDGGAREWFGEVLGSSRTVLARVVDELGPDDGARLRAAAETEQRRGARRIVRQAMACGGGRGIASGRRKGFGGELTDKRKRRRRIGGSHGEVVATVGRNGTGWARPGRKRGEVAPGAPRHAPTHAPVPPVLGGGRRRRDRVERQQGGDGCSATMARRGMWSFEGKEPSTGDQGEAVADSRSSCDRGGHGWQRSALWAVATIGDAPPPIEPKQREVKKVEGTVHRLLREPLGL

SEQ ID NO: 413 - DNA, 3129 bp, Oryza sativa
  misc_feature (64)..(64): s = guanine or cytosine
atgcggctctacctgtacgtgatcgaggcgcggggcctcccggagcacggcggcgatgggggcsgagggccgtactacgcgagggcgaaggtggggaagcagagggcgcggacgcgggaggttgaggcgcgcggcggcggggcgtcggcggcggcggcggagtggaacgaggagctggtgctcgaggtggacgggggcgaggcggtggaggtcggggtggcgcggcggcgggagggcggcgggcgcggcgggagggaggtggtgggcagggtgaagctgccggtgcccgccgccgccgtccccgcggggaggaggagaaggacgaccgtgccgccgacgtggttcacgctgcagcccaagcaccaccgccgctggaagaagggcgcggcggaggcggcggattgcgggaaaattcttctcaccttttcactgcatggagaaaacagcgacaatactgttatccactcatcaccttgttcgagctctaggagcgacactgacattgaatttgagagatcaacttattgggaacattcaagttccaacagtgggacggttgattctcccaggagttttgcaatagaacgatcttctttagaaaattctgaccgttcagcccaagcaaattccaattccaactctgaagatgatgatctaacagagcctagtgcagcaacagcaaagggcacaagtgacatcgaaccaatggttccagatgcaagctttgaagaagctatggaaatcatgaagtctaaaagcatccctgacatgccagaagatcttaatggtggtgtcatgttcgatcacacttaccttgtggactcgaagaatttgaactctcttatctttgggcctgattctcagttctccaaagagttgcgcgagttgcaaggaactatggactatgaggaacagccatggacatggaacaataataatcctcctagcttaaccaggacatgtcaatacaccaaaggtgcaacaaaatttatgaaagccgtcaaaactattgaagagcaaacatatcttaaagcagatggcaagagttatgtaattatgactcgtgttcgtactcccgaggttccatttggaaattgttttgaggttgttatgctgtacaaaataattcactaccctgagttgtcgtcaagtgaaggaatgtcacatctgactgtatcatacaatgtagagttccttcagagtaccatgatgaaaagtatgattgagggaagtgttcgggatggactgaaagaaaattttgaaagttacgcagaaattttgtctcggcatgtaaaaattgctgattctgctgggatggataaagagcgattattggcaccgctccagactgatcatcagtcagatatcagacttgcttacaagtatttttgcaatttcacagtcatctctacagtgataatggcactgtatgttcttgtacacatctttctgtcaagaccaggccctcttatgggtcttgagttcaaaggtcttgatttacctgacacgtttggagagctgatcatatctggcatactagttcttcagctagaacgtttactgagtatgatatctcgttttgtagaggtaagggtacagcgaggaagtgatcacgggattaaagcaaatggagatggttggttgttaactgtagctctgctagaggccacaagcttgccgcctgtctctagcggttccgtagatccttatgttgtgttcagctgtaacggcataacacgaacaagctctgtgcaacttcagactcatgaccctcaatggaacgagataatggagtttgatgccatggaagaaccacctgctacgttggatgttgaggttttcaattttgatggaccatttgatctggcagtttctctgggacatgctgaaattaacttccttaaacacacgtcagcagaactagcagatatatgggtgccactggaaggtaaattagctcagacttgtcagagtaggttacatttgagaatatttctggagaacacaaaaggacctgagacatcaatgagagagtacttaagtaagatggagaaggaagttggtaagaagttacatgttcagtcacctcacagaaatgcaacgttccagaagctttttggtttaccacacgaagaattccttatagcagtttatgcgtgctccttgaaacggaagttgccgttgcagggaagactgtttctgtcagccagaatagttggtttctatgccaatctgtttggacataaaacgaaattcttctttctgtgggaagatgtcgaggaaatcgaagagttaactccatctttcacaacagtaggtactccatctttgttgtttgtcttgaagagcggccggggactcgatgccaagaatggtgcaaagtcccaagataaggaaggcaggacaataattggactatggaaaaccaaatcatcagctattgaacagagggctaaactagaagaagatcaagaagatgaaaactatgtcgatcttaatgatgttcaatctgtattgagcattggagatgtgccactgtcaaaggagtatactttggaactgcctatcgattggaagaggctagataagttatacagtacttgtgtaaacatggatgtgaattttcatccctcgagggcggatctgctgatgggggtgttcgacgggggccccctggaggcgaaggcgatgagcagggcgggttgcctcgactacgccgccaccccgtggcaggacgcccggcccggcgtcctggagcggcacgccagctacaagttcaaccgctacatgtccatcttcggcggcgaggtcgtcagcacccagctcaggctcccctccgacgacggcgacggctggaccgtctacgacgtcatcacgctgcgcaacgtccccttcggcgacttcttccggttgcatttgaggcacaacatatggagcgtggaggccgcgtcgtcggaggcggcggcgagcagcgggagccggtgcgagatactggtggggatcgagtgggtgaagaggagcaagttccagaagaggatcgcgaggaacatctgcgagaagctggcgcacagggcgaaggaggtgctcgaggcggccgccagggagatcgccccggccttgtcgggctag

SEQ ID NO: 414 - protein, 1042 aa, Oryza sativa
MRLYLYVIEARGLPEHGGDGGRGPYYARAKVGKQRARTREVEARGGGASAAAAEWNEELVLEVDGGEAVEVGVARRREGGGRGGREVVGRVKLPVPAAAVPAGRRRRTTVPPTWFTLQPKHHRRWKKGAAEAADCGKILLTFSLHGENSDNTVIHSSPCSSSRSDTDIEFERSTYWEHSSSNSGTVDSPRSFAIERSSLENSDRSAQANSNSNSEDDDLTEPSAATAKGTSDIEPMVPDASFEEAMEIMKSKSIPDMPEDLNGGVMFDHTYLVDSKNLNSLIFGPDSQFSKELRELQGTMDYEEQPWTWNNNNPPSLTRTCQYTKGATKFMKAVKTIEEQTYLKADGKSYVIMTRVRTPEVPFGNCFEVVMLYKIIHYPELSSSEGMSHLTVSYNVEFLQSTMMKSMIEGSVRDGLKENFESYAEILSRHVKIADSAGMDKERLLAPLQTDHQSDIRLAYKYFCNFTVISTVIMALYVLVHIFLSRPGPLMGLEFKGLDLPDTFGELIISGILVLQLERLLSMISRFVEVRVQRGSDHGIKANGDGWLLTVALLEATSLPPVSSGSVDPYVVFSCNGITRTSSVQLQTHDPQWNEIMEFDAMEEPPATLDVEVFNFDGPFDLAVSLGHAEINFLKHTSAELADIWVPLEGKLAQTCQSRLHLRIFLENTKGPETSMREYLSKMEKEVGKKLHVQSPHRNATFQKLFGLPHEEFLIAVYACSLKRKLPLQGRLFLSARIVGFYANLFGHKTKFFFLWEDVEEIEELTPSFTTVGTPSLLFVLKSGRGLDAKNGAKSQDKEGRTIIGLWKTKSSAIEQRAKLEEDQEDENYVDLNDVQSVLSIGDVPLSKEYTLELPIDWKRLDKLYSTCVNMDVNFHPSRADLLMGVFDGGPLEAKAMSRAGCLDYAATPWQDARPGVLERHASYKFNRYMSIFGGEVVSTQLRLPSDDGDGWTVYDVITLRNVPFGDFFRLHLRHNIWSVEAASSEAAASSGSRCEILVGIEWVKRSKFQKRIARNICEKLAHRAKEVLEAAAREIAPALSG

SEQ ID NO: 415 - DNA, 558 bp, Oryza sativa
atggaccccgcccccacgctcgccgccgagctctggcgaacgccgtacctcggtggcggtggtgcccttgacccacccctgatctcgcggcggcggccgatccggcacccggcgacgtgtcccggcggcgatggcggccgcaacggcggcgatggcggccgcaacgccgccgcgggggcggcagcagcgacggggggaagaaggggaagggggaggatgcggtgccgggccaaggtgcctccccatccccggccccggccgcggcaggagcgggcgaggccgccggcgggggcggcggcgggggaggaggaggagacgacgccgaaatgccgcgtggtgacgccgctggtggcggagcccgaggcgcccgcggagctgccgcggtggaggctgcgcggcatgtgggagctcgcctccgtcatcaacttcctccacgtgttccggccattgctgaacattacggtggagttcacggcggaggagctggaggaggcgatcctatcgcccaacaatacattggatgacgttcatatgcctctgctgaaggtgatcgtgtag

SEQ ID NO: 416 - protein, 185 aa, Oryza sativa
MDPAPTLAAELWRTPYLGGGGALDPPLISRRRPIRHPATCPGGDGGRNGGDGGRNAAAGAAAATGGRRGRGRMRCRAKVPPHPRPRPRQERARPPAGAAAGEEEETTPKCRVVTPLVAEPEAPAELPRWRLRGMWELASVINFLHVFRPLLNITVEFTAEELEEAILSPNNTLDDVHMPLLKVIV

SEQ ID NO: 417 - DNA, 6237 bp, Oryza sativa
  misc_feature (323)..(323): k = guanine or thymine
  misc_feature (418)..(418): y = cytosine or thymine
  misc_feature (2540)..(2540): m = adenine or cytosine
  misc_feature (2583)..(2583): m = adenine or cytosine
  misc_feature (2589)..(2589): k = guanine or thymine
  misc_feature (2595)..(2595): r = adenine or guanine
  misc_feature (4083)..(4083): r = adenine or guanine
atgtcccactgcctccgggcgtcgcccttcctctccccgccgcctcccctcctccacccgtcccgccgccgccgccaccgccagggaggctgcatccacacctccccggggacgaggcccctcgtcgcgcgcgcccgcttcgacccgccgccgctgctccgcctcaaggtctccgactccagcgactgccccgcgccgcaccacccgcactcgcagcaccagccgctgctcccgacgcggcggcagcagcagcagccgccgccgccgtaccaggccctcgtcgcctcccttgcgccgctatggcggaaagggctcttcctcgkgcgctgctccgtcttcgcggcggcgctctccgttgccgccgcgctctcctggtacgcgcagctccgcgcccgctccttcgtcgagtctcgcctcytccccgccgcgtgcgccgccctgggggaattcctccagcgggaggtccacctcggcagggtgcgcagcgtctccccgctcgggatcaccctccacacctgctccatcggcccgcacgcggaggagttctcctgcgccgaggtgcccgtcatgaagatcagggtcaggccattcgccagcctcaggcgggggagggtcgtcgtcgacgccgtgctgtccgagccctcggcgctcgtggcccagaggaaggatttctcatggctggggctccccgcgccatccgagggctcacccaagaggcattcgggggaggaggggatcgattaccgcaccaaaacgaggcggctcgcgagggagaaggccgccgagcagtggaatgaggagagggataaggctgcaagggaagccgccgaaatgggatacattgttcctagtgcccaatcgatttcgccttcgatcgatgagatgatggaagacgatggacctgttgatactgggaaatccagcccacacctatgtcctgatgaaatgcacaggaaggaccatcacattgatgcgggcattgactccagctcgaaacatgccgatttggagaaatcgttcggcgtgaaagctcgtattccagggatcagcttctggtctaggatgattccaaaccctagcaggcgcaggtacaggaggaaggctcatagcaagttgatatcggacactgacaattcttctcagcaaaggatccttaggcgtagcgcatatgctgctgttgcatattttcaaaacgagtgtagtggtaatcctgatgactctttgcctggtcctggtgaaagctcatctgatggaggtcatacaaatggtggtggtgaggaaggtagtccaaatgatggaccaactgaatactctgagacaacatctatggattatggtgaattaccgccagagaaaagcaatttcgctagtacaatgctgattggcaatacggatgtcttgaatggaagttctcataatcaacaacctagtcagattagttcacactcttgggaaaataatgagcaagtatctgaagcccctgttttgaagaaacgtaaaaatatatccgaagatgattaccggcaagaattcgattttggggcttttggttcatgcacatatgctcacaactggctatcattttggcccttccaattgaaggggtttcctgtcgggttcaatgcaccatcagcttctctgaatgttcagatccagaagttgaggtcattgtttgctattggtccaggagacaattctgccgaactttcacaaggtgttggccagatccatcctggtgctgttcaacaaactcttcccatcaccctggattctgtatatttcaatggagggaatctgatgcttctaggatatggtgaccaagaaccaagggaaatgaaacatgctaatggacacatcaagttcaaaaacagttataatcgtgtacatgtgcatgtcactgggaactgcatggagtggaggcaagaccggacttctcaaggagggggttatctttctactgatgtttttgttgatatagctgagcaaacatggcatgctaatttgaatgtagtcaatgcttttgctccgctgtttgagcggatcctcgaaataccagttgtttggaataaagggagagctactggcgaggtgcatctctgtatgtcgaagggtgatagtttcccgagcattcatggccagcttgatgtgaagggcctagcttttcagattttagatgctccatcatcgttttcagatatagtggcaactctatcttttcgtggtcaaagagtatttctacataatgcaagtggttggtttggtgatgctccggtagaagcttctggtgattttggtctaaatcctgaggatggagagtttcatctaatgtgccaggttccatcagttgaagttaatgcacttatgaaaacaatgaaaatgcgacccttaatgtttccgttggctggtgctgttactgccgtatttaactgtcaagggcctcttgatgctcctgtttttgttggaagtgggattgtctcaaggaagtctctttcagtatctggtatgcttccatcggcagcctctgaagctgtgatgcaaamcaaagagtctggtgcagtggccgctttggatcatatccccttmactcakgtttcrgcaaatttcactttcaaccttgataactgcgttgctgatttatatggcattagagcatgccttttggatggtggagaaattcgaggagctggtaatgtttggatttgcccagagggggaaggtgatgattctgctatggatattaatttgtctgggagcattttacttgacaaagttttgcatcgctacattcctggaggcatccagttgattccactcaaaattggagagctcaatggagagactagactttctggttcccttattaggccgaaatttgatatcaaatgggctgcaccaaatgcagaagattctttttctgatgcgcgtggcaatattgttattgcacatgactatattatggtcaactcatcatcagtttcttttgatttgaatactcatattcaaacatcatatattgatgattatttgctgcataaggagatgtatcaaaggaaaaaaattatgccactgattgtggagggtgtggatttggatttacgcatgaggggctttgagtttgctcatatagcttcttcgataccttttgattcaccacggcctctacatttgaaagcatctggaaggtttaaatttcaaggaaaagtggtgaaatatagccagttagttgatgagaagaaccatggtgctatacaaggtaccattgaccaaagtaagcttgagaacgatgtatcaaggcttgttggcgagatttctctgtcaggaattaaacttaaccaacttatgctggcaccacaatctactggttttctttccatatcaccagattctataatggttcgaaatttgccacttgatgagctggagtttgcttcattacgtgggtttgttcagaaggcagaactccagcttaatttccagaaaagaagaggtcatggtttgctgtcagttatccgcccaaaatttagtggcatgcttggggaatcacttgatatagctgctcgatggagtggtgatgttattactatggaaaaatcagtcctagagcaagctaatagcaagtatgaacttcaaggggagtatgtttttcctggaacacgtgatagattccctatggaaagtcagagtaatggtttcatagagaaagcgatgggagggcatcttggtagcatgatgtcttcgatgggcaggtggaggatgagattagaagtacctggtgctgaagtagctgaaatgcttccgttggcaagacttctatcacgaagtacagacccagctattcgttccagatcaaaggaactttttatgcaaactttgcattctgttggattcaatgctgaaagtcttcgtgaccagctaaaggcattagaaatgtatcctgattggttggatgatgatacaattgaggatataactcttcctggcttagctgaactgagaggttattggcgtggttctcttgatgccagtggtggagggaacggcgatactatggctgattttgatttcaatggtgaagattgggartggggcacttacaagacacagcgtgttctggcatctggttcattcagcaataatgatggcctgcgtcttgataagttatttattcagaaggataatgccactcttcatgctgatggatcaattcttggcccattaacaaatcttcactttgctgtgcttaatttcccagttggtcttatacccgcattagttcaggctatagaatcatcaaccacagactcgattcattttctgaggcaatggttgacaccaatcaaaggcattctacatatggagggagatttgagaggtactctagcaaagcctgaatgtgatgttcaaataagacttcttgatggcaccattggaggcattgatctcggaagagctgaagtattagcttctgtaaccccaacaagccgttttgtttttgatgcaaacttcgaaccgaccatacaaagtgggcacgttaacattcaaggtagtgttcctgttacttatgtagacagcaactccattgaggaagacctggaagggggagatggtaaacaaggtataataagaatccctgtttgggcgaaagacagaggcttgacaaatgacatcagcgaaacaagaatcatgagagacaagcctgatgagggttgggagtttcaattagctgaaagcctaaagggtttaagctggaatatgctagaaccaggcgaagtgagaataaatgcagatataaaggatgggggtatgacactgataactgcactgagtccttactcaaactggcttcaaggctatgctgaagttcttctccaggttaaaggcactgttgatcaccctgttgttgatgggtctgcctcatttcaccgtgcaaccgtggcttctcctttccttcggacaccactgacaaatttcgctggcaatgttcatgttatatctaacagactatgtatcagttccatggaaagcagagttgggaggaaagggagattgtcaatgaaagggactctacctctccacaatattgagccatcagccaatgacaagattgaactgaaatgcgaagttctggacatacgagcaaaaaatattttgagtggccaagtagacagccagctgcaggttacaggctcaatattgcggccagatgtctctggaatgattcggctaagccatggtgaagcgtatttgcctcatgataaaggcaatggtgctgttgccaccaggctgtcttcaaataaatccatctctgttcctgctggttttgaccaaagaacagtctcacgagatgtctcccactttctaggatcactatcaactagtccagacggccaacaatcagaaactgaaaggactcctgaacatggaagttttaagccaaacattgatgcccgactcaatgatctgaagctcacatttggacctgaattaaggattgtttatcctttaattttgaattttgctgtgagtggcgaccttgagcttaatggcatggttcatccgaagtacataagacctaagggtgtcttaacttttgaaaatggtgaggtcaatttggttgctactcaggtaagacttaaaaatgatcatttgaatgtagcaaagtttgagccagatcttggtttggatcctattctggatcttgttcttgttggatctgagtggcaatttaagatccaaagtcgagcaagcatgtggcaagacaatcttgttgtaacctccacacgctctgtggaccaggatgttctttcacctagtgaggctgcaaaggtttttgagtcacagcttgcggagtcactattggaaggtgatggacagctcgcgttcaagaaactcgcaactgcaacactcgaaactttgatgccaaggattgaaggcaagggtgaatttggtcaagcacggtggcgactggtttatgcaccgcagattccgagtttactatctgtagatccaacggttgacccacttaaatcgctggcaaacaatatatcttttgctactgaggtcgaagtgcaacttggaaaacgccttcaggcctctgttgtcaggcagatgaaagattcagaaatggcaatgcagtggtcactcatatatcagctaaccagcaggctccgtgttctcttccaatctacgccgtccaatcgacttctcttcgagtactctgcaacatcccagggttga

SEQ ID NO: 418 - protein, 2078 aa, Oryza sativa
MSHCLRASPFLSPPPPLLHPSRRRRHRQGGCIHTSPGTRPLVARARFDPPPLLRLKVSDSSDCPAPHHPHSQHQPLLPTRRQQQQPPPPYQALVASLAPLWRKGLFLVRCSVFAAALSVAAALSWYAQLRARSFVESRLVPAACAALGEFLQREVHLGRVRSVSPLGITLHTCSIGPHAEEFSCAEVPVMKIRVRPFASLRRGRVVVDAVLSEPSALVAQRKDFSWLGLPAPSEGSPKRHSGEEGIDYRTKTRRLAREKAAEQWNEERDKAAREAAEMGYIVPSAQSISPSIDEMMEDDGPVDTGKSSPHLCPDEMHRKDHHIDAGIDSSSKHADLEKSFGVKARIPGISFWSRMIPNPSRRRYRRKAHSKLISDTDNSSQQRILRRSAYAAVAYFQNECSGNPDDSLPGPGESSSDGGHTNGGGEEGSPNDGPTEYSETTSMDYGELPPEKSNFASTMLIGNTDVLNGSSHNQQPSQISSHSWENNEQVSEAPVLKKRKNISEDDYRQEFDFGAFGSCTYAHNWLSFWPFQLKGFPVGFNAPSASLNVQIQKLRSLFAIGPGDNSAELSQGVGQIHPGAVQQTLPITLDSVYFNGGNLMLLGYGDQEPREMKHANGHIKFKNSYNRVHVHVTGNCMEWRQDRTSQGGGYLSTDVFVDIAEQTWHANLNVVNAFAPLFERILEIPVVWNKGRATGEVHLCMSKGDSFPSIHGQLDVKGLAFQILDAPSSFSDIVATLSFRGQRVFLHNASGWFGDAPVEASGDFGLNPEDGEFHLMCQVPSVEVNALMKTMKMRPLMFPLAGAVTAVFNCQGPLDAPVFVGSGIVSRKSLSVSGMLPSAASEAVMQSKESGAVAALDHIPLTHVSANFTFNLDNCVADLYGIRACLLDGGEIRGAGNVWICPEGEGDDSAMDINLSGSILLDKVLHRYIPGGIQLIPLKIGELNGETRLSGSLIRPKFDIKWAAPNAEDSFSDARGNIVIAHDYIMVNSSSVSFDLNTHIQTSYIDDYLLHKEMYQRKKIMPLIVEGVDLDLRMRGFEFAHIASSIPFDSPRPLHLKASGRFKFQGKVVKYSQLVDEKNHGAIQGTIDQSKLENDVSRLVGEISLSGIKLNQLMLAPQSTGFLSISPDSIMVRNLPLDELEFASLRGFVQKAELQLNFQKRRGHGLLSVIRPKFSGMLGESLDIAARWSGDVITMEKSVLEQANSKYELQGEYVFPGTRDRFPMESQSNGFIEKAMGGHLGSMMSSMGRWRMRLEVPGAEVAEMLPLARLLSRSTDPAIRSRSKELFMQTLHSVGFNAESLRDQLKALEMYPDWLDDDTIEDITLPGLAELRGYWRGSLDASGGGNGDTMADFDFNGEDWEWGTYKTQRVLASGSFSNNDGLRLDKLFIQKDNATLHADGSILGPLTNLHFAVLNFPVGLIPALVQAIESSTTDSIHFLRQWLTPIKGILHMEGDLRGTLAKPECDVQIRLLDGTIGGIDLGRAEVLASVTPTSRFVFDANFEPTIQSGHVNIQGSVPVTYVDSNSIEEDLEGGDGKQGIIRIPVWAKDRGLTNDISETRIMRDKPDEGWEFQLAESLKGLSWNMLEPGEVRINADIKDGGMTLITALSPYSNWLQGYAEVLLQVKGTVDHPVVDGSASFHRATVASPFLRTPLTNFAGNVHVISNRLCISSMESRVGRKGRLSMKGTLPLHNIEPSANDKIELKCEVLDIRAKNILSGQVDSQLQVTGSILRPDVSGMIRLSHGEAYLPHDKGNGAVATRLSSNKSISVPAGFDQRTVSRDVSHFLGSLSTSPDGQQSETERTPEHGSFKPNIDARLNDLKLTFGPELRIVYPLILNFAVSGDLELNGMVHPKYIRPKGVLTFENGEVNLVATQVRLKNDHLNVAKFEPDLGLDPILDLVLVGSEWQFKIQSRASMWQDNLVVTSTRSVDQDVLSPSEAAKVFESQLAESLLEGDGQLAFKKLATATLETLMPRIEGKGEFGQARWRLVYAPQIPSLLSVDPTVDPLKSLANNISFATEVEVQLGKRLQASVVRQMKDSEMAMQWSLIYQLTSRLRVLFQSTPSNRLLFEYSATSQG

SEQ ID NO: 419 - DNA, 1923 bp, Oryza sativa
atggcaactactgtttcctctcagttttctatatgcttttgtgtacttctcttggtccatgattctatggcccaactattttatccaagaacaaacccatggcatagtcctcatcaaggaagttttagtgagtatagatttgatagattacaagcatttgagtcacttcagaaagtgagatcagaaggtggtgtgactgagtatgttgatgagaggaatgaattattccagcacactggtacgtttgtcatccgacgtatcattcagcctcaaggtcttttggtacctcgatacaccaacactctcagcatggtctacatcatccaagggagaggtactatgggcttaactttcctcggttgcccagcaacttaccaacaacaattccaacaattttcgcctcaatggcaaagtgaaagccaaaagtttaggggcgagcaccaaaagatctatcaatttagacaaggagatattattccactcccagctggtgttgcacattggttctacaatgatgctgctaacaacaatagagttcaacaagtatatggtagctcaattgagcaacaccctaggcaaaatatattcaacagaatcggtgttgagcaactaagtgaggctttaggcatcaacacagtagcagcaaagaggccgcagagtcaaaatgaccaaagaggagagatcattgttgacgggttatacccgaccgcggtatttaagggacgtaaggtacgactgataccaaggaatacgcgagagtggaataagagagcatgggacaaggatttttatactggttcaggccctcaagatcttcccgaggacatggtgaagagcagcaccaagaaggtggtgatagacaagccaagcatggctagagacatcccgacctcgttgtgcgacctgccccaagctgtcagggatgggattgtaaatgaagtcgcggccacaaaagacgtggtggagatggagatagggtcctctaccgccgagaaggtggctaacatggcctctcaacctgggtctagtggtaccgttggatccaagaagaggaaatggggcttcggagtggaccccacgggtggtgtcctgacaaagggtacccattccttgacctcctcacccgataatgcccccactagtggaaggctcaaaccaatgagatttatgtcgaagagcaaggccaaggccgcccctaccatctccaatcagaacatggggaaacatgacgaggctagttcccaaccagccacccacatcatcgtctccccctccacagcccccctcccctccgttgctgcagttgtcttgccgcctccaggaacggcgttcaaccatctagctagtgcctgccaagaggtactcttttcagctaaggcagccagcacagaagtcaaccggctcatcgccgagctcactgctaccaacgagaagttaagcaaactcaaggaggagttgaccacggcgaacaccaacaacgaaagcctgcgccttctcattaaagagaattcggaaatgcaccaagagggtcagaaggccctagcggaggagaagagcaaaagggaggccctttatgccgggctgaaggagaacttctttgccttcaatgaggtggcgaagcaacttggtcgtggggtgcagccgccaccgcacttcgatgatgtctcgctactagcgtccattggcgagctagttggcgagatggagaaggtccccgctgacatcatccagaaagctgactgggacacccgcatcgccctcaagactggagcctgccacacccttgcttgtatctcgtccaagcatccagagctggacctcaacaaggaggtccacgagggtgtggctgaggaggagagggaaaagctcatggatcaacttgagaagactggcgaggcggtggctagcttctatctcgactag

SEQ ID NO: 420 - protein, 640 aa, Oryza sativa
MATTVSSQFSICFCVLLLVHDSMAQLFYPRTNPWHSPHQGSFSEYRFDRLQAFESLQKVRSEGGVTEYVDERNELFQHTGTFVIRRIIQPQGLLVPRYTNTLSMVYIIQGRGTMGLTFLGCPATYQQQFQQFSPQWQSESQKFRGEHQKIYQFRQGDIIPLPAGVAHWFYNDAANNNRVQQVYGSSIEQHPRQNIFNRIGVEQLSEALGINTVAAKRPQSQNDQRGEIIVDGLYPTAVFKGRKVRLIPRNTREWNKRAWDKDFYTGSGPQDLPEDMVKSSTKKVVIDKPSMARDIPTSLCDLPQAVRDGIVNEVAATKDVVEMEIGSSTAEKVANMASQPGSSGTVGSKKRKWGFGVDPTGGVLTKGTHSLTSSPDNAPTSGRLKPMRFMSKSKAKAAPTISNQNMGKHDEASSQPATHIIVSPSTAPLPSVAAVVLPPPGTAFNHLASACQEVLFSAKAASTEVNRLIAELTATNEKLSKLKEELTTANTNNESLRLLIKENSEMHQEGQKALAEEKSKREALYAGLKENFFAFNEVAKQLGRGVQPPPHFDDVSLLASIGELVGEMEKVPADIIQKADWDTRIALKTGACHTLACISSKHPELDLNKEVHEGVAEEEREKLMDQLEKTGEAVASFYLD

SEQ ID NO: 421 - DNA, 1629 bp, Oryza sativa
atggcggtacctggacccttgaagcagcagttcagaactgattgcactgagtattttctctggagatatccatttgatggaggtggaaggaaagagaggctagtcaatagccaaaagttatttatgcatcctaggagtgatccagctaacggagctggatcgtctggctatgtgggtaacacaatgagatcgaatgatcttccgtcttcaagttatgctggccaagcttatggtcagcagaatagagcccccatccatgcttcatattctggtcatgcacctgctggaagctctagtggtagctatgcaccatacaatactcaacatatgcctgcttcaagctatccacacggatccgaggataatttcattccaagttcccatgtggatggcagaagggttgcattgaagagaagaaatcccatcattcatcctacagatggattcggtgttggaaattattatgctggcagttcttccaatactcagttctctcggcccatgcctccaaatcctattccacctcctgaatcctgtgttcgaatgccctcacacttgggttcgaaccactggaatgatcaccgctatgttaatcatgaaggatctcagaggaatgtgaggggaagacatgatcatagtactatccatttggaacaaagtccagctgcagcttgcccgtcaagcagcatcaatgtgccaccataccatccaaatgcaaatggtccttttggaagtgcaccagtacaacgtgacagagctcctttatctgtgcatccaagaattcttcctccagggcctgatggtagtagcatagcattcagagagaggccatactatcctgctccacagagcaccaacataagtgcacctgtgccaacgcttcctatttcttgtgacagtgcaccatttgctcatggtgggtacgcccctagatcagctcatcgtaacaacttacgcacttatcctcctccagcttttgcatcttcttccaaccctggagcagtctcccatgagccagctattcctagctatccacctgctgcccctagctatccacctgcaacctctgcagcatcatcaagtgtccagccatttcatgctgaagctgctgcacatttgaggcatccaaggcatgtatctgtagggggcagtggtagtgcaaggagtagaaggatgagggattcctatcatggttttcatcatttgatgattgaagacaataacttgggaagatcagcagctgagcggtttatgatgctggatcagttagttatccatgaatcaagagaagcattcgatcctcactgggacatgagactggacattgatgacatgagctatgaggagctgctggctttggaagaacgcataggccatgtgaacactggcctcgctgatgagaaaatttctggctgtgtgatggaggtagcctgctgcagcagtagtcatttgcaggatgatcaggacaatgaaagatgtgtaatctgcctggaggaatacaagcatgaggacacacttgggaggctgaaatgcggccacgggtttcactgcaattgcatcaagaagtggctgcaggtgaagaacacctgcccagtttgcaaagctgctgccgcagatgaaggcagctga

SEQ ID NO: 422 - protein, 542 aa, Oryza sativa
MAVPGPLKQQFRTDCTEYFLWRYPFDGGGRKERLVNSQKLFMHPRSDPANGAGSSGYVGNTMRSNDLPSSSYAGQAYGQQNRAPIHASYSGHAPAGSSSGSYAPYNTQHMPASSYPHGSEDNFIPSSHVDGRRVALKRRNPIIHPTDGFGVGNYYAGSSSNTQFSRPMPPNPIPPPESCVRMPSHLGSNHWNDHRYVNHEGSQRNVRGRHDHSTIHLEQSPAAACPSSSINVPPYHPNANGPFGSAPVQRDRAPLSVHPRILPPGPDGSSIAFRERPYYPAPQSTNISAPVPTLPISCDSAPFAHGGYAPRSAHRNNLRTYPPPAFASSSNPGAVSHEPAIPSYPPAAPSYPPATSAASSSVQPFHAEAAAHLRHPRHVSVGGSGSARSRRMRDSYHGFHHLMIEDNNLGRSAAERFMMLDQLVIHESREAFDPHWDMRLDIDDMSYEELLALEERIGHVNTGLADEKISGCVMEVACCSSSHLQDDQDNERCVICLEEYKHEDTLGRLKCGHGFHCNCIKKWLQVKNTCPVCKAAAADEGS

SEQ ID NO: 423 - DNA, 978 bp, Oryza sativa
atgcaatatacagtgccgtctgcaatccggactgcatggggtctaacaaagactattgtcttcatcgaagcccctgaagaaatgcataacggaatgacggtcacagggggacacagaggactagaggagcttcctagaaataattccatgggaaacgcggtgctaaggactacagagtttgaagagaaacttaaccatcgcaatcttccaccgaactgcttactcatattcgatcatcgatatgttttcctgcctcgacatgagcctcgccgtgttgctcgatctcgcatggcccctctgacggagctagggtccagagttttgagttatttccaagaggaaaaatccatggcgaatagcaatgcgttagcggggaggcggggcattggcaatagagcggcggtgacggaggaactccagggagtggccgacccatgcatagctctaggcggtggcggtgagtcgagacctggagccacctgggagtcaggagcgcagcttggcaagcacaccctgaacgccctgggagccaaatcctggatgatgacgacgcccaggagagcctcttcatcgagcatgtcgcggcggcgtgcgtgggagcatgagatggcgccacggggagagcccgatcggtgctcattgcaatcgtccctctctgacgtcatcgctaaggagaggagacaaaagtaccttccccacggcaaaagctggtgtgaaagggagcctacgtgttgcatgccagggtgggagagagaagaggagcgctcactgccagccgccgctgctcccgttcttcgtcccgccgttgatccttctcgtcgtcccgtcactgctcccgcttgtagtcccaccgcgaccgccgccgctgtggagaagagggacaagaggagacagccatgggaggaagggccaaagggggaagagagagagagagagaagggggaaagagaggaatggggaagaacggaaggggagtga

SEQ ID NO: 424 - protein, 325 aa, Oryza sativa
MQYTVPSAIRTAWGLTKTIVFIEAPEEMHNGMTVTGGHRGLEELPRNNSMGNAVLRTTEFEEKLNHRNLPPNCLLIFDHRYVFLPRHEPRRVARSRMAPLTELGSRVLSYFQEEKSMANSNALAGRRGIGNRAAVTEELQGVADPCIALGGGGESRPGATWESGAQLGKHTLNALGAKSWMMTTPRRASSSSMSRRRAWEHEMAPRGEPDRCSLQSSLSDVIAKERRQKYLPHGKSWCEREPTCCMPGWEREEERSLPAAAAPVLRPAVDPSRRPVTAPACSPTATAAAVEKRDKRRQPWEEGPKGEEREREKGEREEWGRTEGE

SEQ ID NO: 425 - DNA, 2238 bp, Oryza sativa
atgggtgaagcatcgggtttggtctctaatctgcttaaaagttcgttaacaccaattcactgctctgatgcgcaagttgatgaagtaacagatgtgttgtcctgcccagtcaagttgctgccaattgtttaccttgggttgccactctccgtcagaaaaccaacaaaggagcagattcaaccaatgatggataggcttgcaaaaagcttggctggctggaaacccaagcttttatcccctgatgcccgcctaacgctgatcaaacatgtcctaatggccctacctctttacttcatgtcagttttggaactctctttacttcatgtcagttttggaagtccctgtcttggcgatcaacgaaatagagaagaaatgccggggattcctttggaaaggtggtcctggggaatggataagatgctctattttggaaagataattggttgccggatggtggttcagtggaaaacagaggacctatcctctttatctttcgttaagaatagtggaatgactgtggcggctgctctccgtaataattcctgggtctcagatatcagagacggcctctcggttcaagcattgggcgaatatctagatctgtgggatgtgatcgctggaatctctcttgaccctgctagtcgggatgagatgatatggaaggcagctccggatggcaggatgaagtgcccacttggcaagattatttggaaatcccgtgcaccggcgagatgcaagttctttatgtttctcgcaatgcgcaacgcttgcctcaccgccgacaatctacaacgccgcggattgagccttgcccggatttactatatgtgttctctaaagcaacagaccatggtagcgttattccggtttctgacgtacatgctttatgctatttcattcggtgaatttgggaaaaagttgcgagacagattatgtctttccttcttcccagatactcgtattactacccttcgagtagagatcatcagtttccagcagatcaaaaacgaatcaatcggtgcagcttggtctagattcactaatttactgcagtccggaccaaccttgtccttacccgaatatatgctcttgcaacatttccatatgggtttggataaggaatctacattctatctgaacataaccgccggaggatcattcatgcacaaaacgccgttggaaggaaaaataattctagaccgcattctagaaagtacctccttcatggcacagtctgatgaaccccctccggaggtatccgtgtccaagatagaggaaccttcaacaatcgagtcacaatctgaaccttccacttccactggctcgattgatgagaaagttcctttgcagccatccgttgcgaatgaagaaattcagacttcggaccatgccgcaattctgttaagggacggttttgacgaagactatggcaacaccctaaactattttagtaaaaagaaaccactcgtccctttgccgcctcctgatcttatggaacttgggttcctacgggaaactgttcgggagctaacatccataatgagcgacgaatggctaagggaggcagagctttcatacgaagggaacgacattggtattctttacagtccaactatcgaggttaatctcatctttgagtcatttgcattcgcttatctgagcgataagccagtaaccctgacaaacaaattcttcaaacacccgaacggaaatatcatcgaaggatttgggattgtgcaagatgtgcctgtctactttgaagacagggaggcggtcttggatttccacgtctttgaaatccgagatattgtcattctaatcgggctttccattgagcaactcctcataaacacgctccgattagatagcctcaagataactttgggagggaatgaattctcagttccattctcgcgggcaaggttcgccttgaccgactctctctcagagattgagttagcggaggagatctgggaagaagaagggaaggagaagaaagggaaagaaggaagcggaggaaatcgaggatgttacgtgaaatatcgatcgaagatatctttgagaagtgttttcttctctgggattttggcatcccaggcttatgtggttttcttgggtgttacagttacagcagttccccctcacgaatctcccgagccacttctggaagatgaggttgttgcaagatatgaaatagtaaataagggttgctatgatcttgatcctagtttgacttaa

SEQ ID NO: 426 - protein, 745 aa, Oryza sativa
MGEASGLVSNLLKSSLTPIHCSDAQVDEVTDVLSCPVKLLPIVYLGLPLSVRKPTKEQIQPMMDRLAKSLAGWKPKLLSPDARLTLIKHVLMALPLYFMSVLELSLLHVSFGSPCLGDQRNREEMPGIPLERWSWGMDKMLYFGKIIGCRMVVQWKTEDLSSLSFVKNSGMTVAAALRNNSWVSDIRDGLSVQALGEYLDLWDVIAGISLDPASRDEMIWKAAPDGRMKCPLGKIIWKSRAPARCKFFMFLAMRNACLTADNLQRRGLSLARIYYMCSLKQQTMVALFRFLTYMLYAISFGEFGKKLRDRLCLSFFPDTRITTLRVEIISFQQIKNESIGAAWSRFTNLLQSGPTLSLPEYMLLQHFHMGLDKESTFYLNITAGGSFMHKTPLEGKIILDRILESTSFMAQSDEPPPEVSVSKIEEPSTIESQSEPSTSTGSIDEKVPLQPSVANEEIQTSDHAAILLRDGFDEDYGNTLNYFSKKKPLVPLPPPDLMELGFLRETVRELTSIMSDEWLREAELSYEGNDIGILYSPTIEVNLIFESFAFAYLSDKPVTLTNKFFKHPNGNIIEGFGIVQDVPVYFEDREAVLDFHVFEIRDIVILIGLSIEQLLINTLRLDSLKITLGGNEFSVPFSRARFALTDSLSEIELAEEIWEEEGKEKKGKEGSGGNRGCYVKYRSKISLRSVFFSGILASQAYVVFLGVTVTAVPPHESPEPLLEDEVVARYEIVNKGCYDLDPSLT

SEQ ID NO: 427 - DNA, 4455 bp, Oryza sativa
atgaagaggccacctcctaaggtccagcagtcacgcatccccatcagggataaggacaaggaacaagaagcgacgccgatttcagatcgatttgtttgggtaatcgacatcaatccccacgaaccatcagtcttgcacttgctcgaagactatggatcatcgacaacgagtacgccgcgtgaggtattggctatcgacgatgtcggcacgtcagcgcgcagcaatgcggaagcggagaatcaagtgactactccggcccaacacattagagccgtcaacgcaatactgagggaaaccccctacgatcccgttctgaacaacgatctcgcacgttggacagaacgactacaggaatcagtaaccaacctcagcaacgcgttcgaagaggccgctgccgcagcgcacccagaacagccaccaactggcgatgctaatgatagacatccacgaaggatgtatgatcgccgacaacccaccgcccccagcactaggtgtagagctttcgatcgttcacttcgagatatccgatggcctgaaagattccgacctggagcaatagagaaatacgatgggagcaccgaccccgaagagttccttcaggtttactccacggtactctacgctaccggagcggacgacaacgcattggtgaattacttgccgaaccgcattgaaaggctctacttgtggcagcagttcgtagccaacttccaaggaacttacaagcgccacgcgatcgaagacgacctacatgcgttaacacagaacccgggcgaatccttgagggactatgttcggcgctttaacgagtgcaggaacacaatccccgagatcaccgatgcttctgtaattcgcgctttcaaatccggtgtcagagatctctatactactcaggagttggcaacgaggcgcatcatgactactcggagattattcgaaattgtcgaccaatgcgctcatgcggatgacgcactgagacacaagaacgacaaaccgaagaccggagaagagaagaaaccagccaaggacacacctgagtcaagcaagaagaaaaatcgcaagagtgggaaaaggaaagctcaagcggaatcgctcgagaagcacatggcattggaaaaaggcaagagagtacgcgtggtcgagaaggatgcggtggcggctactcaggaatcggactcagcatacccagactccgatctccacgtctcacacattttcggaggctctacagcgtactcctcaaagcgagaatacaagaaagtggaacgtgaagtctgttcgacgtggcagggagctgcacccaagatgaagtggtccgagcagaagatagaattctcagaagaggaccaccctaagactgctgtcatcccagggcgatatccgatcgtggtcgaacccactaatttcttaatcaaccttctcttcgccagcgccttggacgcgatgggaatcccacgaagcgagttgacacccaccgatcaacccttccttggaatcactccccagtcttcgtccaaaccattgggcaagatcacgttgcctgtgactttcggccaagcatacaacttccgaacggagcagatcacctttgatgtcgctaaattcgatacaacatataatgccatcattgggagaactgcactcgcgaagttcatggccgcatctcactacgcgtatcaagtgctcaagatgccgggaccgaagggaacaatcactattcaagggaacgcaaagctggcagtacaatgcgacaagcggagcctcgacatggtcgagcacacgcccagcccacccgccacgactgagccacccaagaaagtgagcaaaacaaacaagacgccgaaactggacggcgcgatcaagaccgttccactctctagtgccaaccccgacaagaccgtcaagattggggcatcactaaacgagaaattggaactcgcgctcatcaccttccttcgcgacaatgccgacatgttcgcctggcagccgtccgacatgccgggggtccccagggaggtgattgagcacaaactcatgatgcaacccaatgccaagccagtaaaacaaaaattacggagatttgcaccagatcgaaaacaagccatacgagaagagctcgacaaacttctcaaagatggtttcatcagagaggtactccatccagagtggctagccaatccagttatggtgcggaaggccaacgggaaatggagaatgtgtgttgatttcaccgacctcaacaaggagtgtcccaaggatcacttccctcttccccgaatagaccaactggtggactcaacagtcggttgtgagctactgagctttcttgacgcttactccggctaccaccaaatcagcatggcgaaagaggacgaggagaagaaagcattcatcactccgttcgagggcgcacttagcgaccagcttggaaacaatgtcgaggcctacgtcgacgacattgttgtcaagaccaagacaagcgactcactgattgacgatctgcgggaaacgttcgacaacctccgacgatatcgcctcatgctcaatccagagaagtgcacgttcggagtactgtcgggcaagctgctcggttttctcgtctctggcagaggaatagaagcaaataccgagaagatcaaggcaatcgagaacatgaagtcgcccacaagactcaaggaagtacaaaagctaaccggatgcatggcggcactaagcaggttcgtcgttaggatgggagaacgaggacaacctttcttcgctctgctgaagaagcaagacaaatttgtatggacacaggaagccgaagaggcattcattgcattcaagcgctacctatcaaacccccctgtacttgttgctccccaacctaatgaagaattattcctctatattgccgccacaccatattccgttagcatcgtcattgttgtcgagagagaaaaagtacaacgaccagtctactacgtcagcgaagctctccacgacgcaaagacaagatatccacagatccaaaagcttctctacgcgataatcatgacatcgagaaagctacgccactactttcaagcccacagagtcatagttgtctcctccttccctctcggtgaagtcgtgagaaacaaagacgttgtcggtcacattgcgaaatgggtagtcgagctaagccagtttgatgtccactttgtgccacgaacagccatcaagtcccaggtactcgccgacttcgtagctgattggactatgcccaataacaaatcagacaaccgaatcgacaacgaaacatggacaatggcgttcgatggcgcactcaacagccaaggagcaggagcaggattaatcttgacatcaccttgcggggatcaattcaagcatgcaatccacctcaacttcagggcaaccaataacatagccgagtacgaaggactactagccgggataagagctgcagctacacttagagtcaagcgactgatcgtacgagaaccactcgagcccggcacttttctggacgtcctggcaaagccatcagtgaaagaggttagcggcgaaggtaacccagtcgcccccgacatcagctcggaggctacagaggcagaatgcgtcgttgccgatatagagacgacagacgtctggcgcaccccactgattaaattcatcaacagcgaagagttgcccgaggacgacgcaaaagccgagaaaataacccgtgaagcaaaaatctactgtatgatcggcaacgatctatacaagaaggcgccaaacggggggctagacatactcgggccattcccacgaggacagagcggctacaggttcttattcgtggcgatcgacaaattcactaagtggatcaaagcgacacccacgggggaaatcaaggccgacaacgccatcaaattcatcaaagggatattttgcagatacggactgccgcactgcatcataaccgacaacggctcccagttcatcagcgccgatttccaggattactgtatcggcctgggagtcaagatctgcttcgcctcggtttctcaccctcaaagcaacggacaagtcgagagggcaaacggcatagaaacacccttcttcctcgtgtacggctcagaggccatgctcccaagcgagctacgacatcaaagtacacaagtacagaagtattccgatgaggatcaggaggagcagcgaaacgacgatgtgaatctactcgaggaacatcgcgaacgagttgccgtccgagcagccagctaccaacaggccctccgccgttaccatgagaagcgcatccgagcacgcatactttcgatcggcgacttcgtcctccgacgggttcaaagccaagcagggcgaaacaagctctcacccaaatgggaaggaccatacacgatcacacaagtcttgcggccagacgcattcaaaattgcagacggtgatggtcgcgagttggcaaactcttga

SEQ ID NO: 428 - protein, 1484 aa, Oryza sativa
MKRPPPKVQQSRIPIRDKDKEQEATPISDRFVWVIDINPHEPSVLHLLEDYGSSTTSTPREVLAIDDVGTSARSNAEAENQVTTPAQHIRAVNAILRETPYDPVLNNDLARWTERLQESVTNLSNAFEEAAAAAHPEQPPTGDANDRHPRRMYDRRQPTAPSTRCRAFDRSLRDIRWPERFRPGAIEKYDGSTDPEEFLQVYSTVLYATGADDNALVNYLPNRIERLYLWQQFVANFQGTYKRHAIEDDLHALTQNPGESLRDYVRRFNECRNTIPEITDASVIRAFKSGVRDLYTTQELATRRIMTTRRLFEIVDQCAHADDALRHKNDKPKTGEEKKPAKDTPESSKKKNRKSGKRKAQAESLEKHMALEKGKRVRVVEKDAVAATQESDSAYPDSDLHVSHIFGGSTAYSSKREYKKVEREVCSTWQGAAPKMKWSEQKIEFSEEDHPKTAVIPGRYPIVVEPTNFLINLLFASALDAMGIPRSELTPTDQPFLGITPQSSSKPLGKITLPVTFGQAYNFRTEQITFDVAKFDTTYNAIIGRTALAKFMAASHYAYQVLKMPGPKGTITIQGNAKLAVQCDKRSLDMVEHTPSPPATTEPPKKVSKTNKTPKLDGAIKTVPLSSANPDKTVKIGASLNEKLELALITFLRDNADMFAWQPSDMPGVPREVIEHKLMMQPNAKPVKQKLRRFAPDRKQAIREELDKLLKDGFIREVLHPEWLANPVMVRKANGKWRMCVDFTDLNKECPKDHFPLPRIDQLVDSTVGCELLSFLDAYSGYHQISMAKEDEEKKAFITPFEGALSDQLGNNVEAYVDDIVVKTKTSDSLIDDLRETFDNLRRYRLMLNPEKCTFGVLSGKLLGFLVSGRGIEANTEKIKAIENMKSPTRLKEVQKLTGCMAALSRFVVRMGERGQPFFALLKKQDKFVWTQEAEEAFIAFKRYLSNPPVLVAPQPNEELFLYIAATPYSVSIVIVVEREKVQRPVYYVSEALHDAKTRYPQIQKLLYAIIMTSRKLRHYFQAHRVIVVSSFPLGEVVRNKDVVGHIAKWVVELSQFDVHFVPRTAIKSQVLADFVADWTMPNNKSDNRIDNETWTMAFDGALNSQGAGAGLILTSPCGDQFKHAIHLNFRATNNIAEYEGLLAGIRAAATLRVKRLIVREPLEPGTFLDVLAKPSVKEVSGEGNPVAPDISSEATEAECVVADIETTDVWRTPLIKFINSEELPEDDAKAEKITREAKIYCMIGNDLYKKAPNGGLDILGPFPRGQSGYRFLFVAIDKFTKWIKATPTGEIKADNAIKFIKGIFCRYGLPHCIITDNGSQFISADFQDYCIGLGVKICFASVSHPQSNGQVERANGIETPFFLVYGSEAMLPSELRHQSTQVQKYSDEDQEEQRNDDVNLLEEHRERVAVRAASYQQALRRYHEKRIRARILSIGDFVLRRVQSQAGRNKLSPKWEGPYTITQVLRPDAFKIADGDGRELANS

SEQ ID NO: 429 - DNA, 459 bp, Oryza sativa
atgaggtgggcttttgtgattttccaaagaattaatcttcgaatgggccttagcccatctattaattccaacaatcccccaccaaatctcaaaatcccactgaaatttgccttttccaatgtactgtttatataccagcggttcgatggagaccgattaaggttgaacatccacctagaactccaagccacacttactcacaacttgaacaatggactacgccttgaattgcaagtcttgtgcaagcaagtttcactcagagtcttatctggtactagaccgtctgtagactacccctcggattccaattcacgggatctccgatcacatagactgggttaccaccatagtataactcacatgggtctcaaacccatctccttcgatgcattgtctatcacatttcgtgatagtcccttcgtgaagggatctgccaggtttctagctgtttggatgtaa

SEQ ID NO: 430 - protein, 152 aa, Oryza sativa
MRWAFVIFQRINLRMGLSPSINSNNPPPNLKIPLKFAFSNVLFIYQRFDGDRLRLNIHLELQATLTHNLNNGLRLELQVLCKQVSLRVLSGTRPSVDYPSDSNSRDLRSHRLGYHHSITHMGLKPISFDALSITFRDSPFVKGSARFLAVWM

SEQ ID NO: 431 - DNA, 556 bp, Oryza sativa; identical to SEQ ID NO: 11
  misc_feature (412)..(412): r = adenine or guanine

SEQ ID NO: 432 - protein, 185 aa, Oryza sativa; identical to SEQ ID NO: 12
  misc_feature (138)..(138): Xaa = any naturally occuring amino acid

SEQ ID NO: 433 - DNA, 1113 bp, Oryza sativa
atggctcttgaggggaaaccaggtttcattaccatgtacgccatcacatgctgcaaatgcgagaaatggcgtacgattccaacaaaagaagagttcgaggtaatccgtgagaactaccccgcgaagccatggttctgcagcaaaaagcgcgactgctcatgtgagcaccctgaagatatccagtatgacaccagccgtatttgggccattgataggcccaacatccctaagcctccgccgaagacagagaggctactgatcatgaggaatgatctatctaaaatggatgcctattatgtcttgccaaatgggaagcgtgcaaagggcaaacctgatatagataggtttctgaaggaaaacccagagtatgctgctactttaccactttcgagcttcaacttctcaacacctaagatagttaaggagactgtttccgatagtgcaaagtgggtgatggcgaagtctgagagggaagagcagtgtatgcaactagacgcaaaagaagttccaagttccagcagcaagaagcgtgtgtgtaaaatgagagtaaagttgggaaagtgtcccgaacacaacctccaaggtaggtgcacactgcacatcaccagaaaacgaggctcctccacagactccattggcatgtatgcagttcaatgttgtgagtgtcacaaatggcgcaaggttccgacgaaggatgaatttgagacaattcgtgagaatttcactgaggagccatggcactgcagtagaagacctgactgctcgtgtgaagaccctgctgacatcgaatatgatagcagccgtatatgggtccttgacaagcctaacataccaaagcctccagcaggaactgagagactagtgattatgagaggtgatttgtctaaaatggatacctactatgtcatgccaaatgggaagcgtgtaagatgcactgcagaggtggataagttccttgaggccaacccgcagtacaaagatcgcttttcagttgaaagcttcagctttacaacaccaaagattgtcgaggaaactgtttctcacaactccgtgtggaagtctggaaaggctaagaagcaggacaagataaatgctttgagcaataacaattaa

SEQ ID NO: 434 - protein, 370 aa, Oryza sativa
MALEGKPGFITMYAITCCKCEKWRTIPTKEEFEVIRENYPAKPWFCSKKRDCSCEHPEDIQYDTSRIWAIDRPNIPKPPPKTERLLIMRNDLSKMDAYYVLPNGKRAKGKPDIDRFLKENPEYAATLPLSSFNFSTPKIVKETVSDSAKWVMAKSEREEQCMQLDAKEVPSSSSKKRVCKMRVKLGKCPEHNLQGRCTLHITRKRGSSTDSIGMYAVQCCECHKWRKVPTKDEFETIRENFTEEPWHCSRRPDCSCEDPADIEYDSSRIWVLDKPNIPKPPAGTERLVIMRGDLSKMDTYYVMPNGKRVRCTAEVDKFLEANPQYKDRFSVESFSFTTPKIVEETVSHNSVWKSGKAKKQDKINALSNNN

SEQ ID NO: 435 - DNA, 531 bp, Oryza sativa
atggcttccaacaaggtagtgttctcagtgttgcttctcgccgtcgtctccgtgctcgcggcgacggcgaccatggcggagtacccaccacccaagaccaggtggtctaaaccccgggcccgctctgtcagccaggaatgggctacccgatgtacccgcttccgcgttgccgggcgttggtgaagcgccagtgcgtcggccgtggcacggccgccgccgccgagcaggtccggcgagactgctgccggcagctcgccgccgtcgacgacagctggtgcaggtgcgaggcgatcagccacatgctgggaggcatctacagggagctcggcgcccccgatgtcgggcaccccatgtccgaggtgttccgcggctgccggagaggggacttggagcgcgcggcggcgagcctcccggcgttctgcaacgtggacatccccaacggcggaggtggtgtctgctactggctggcgagatctggctactagctaggctactgtagctagctgtgcatgtatgtggtgtggttactaa

SEQ ID NO: 436 - protein, 176 aa, Oryza sativa
  misc_feature (1)..(176): Xaa = any naturally occuring amino acid
MASNKVVFSVLLLAVVSVLAATATMAEYPPPKTRWSKPRARSVSQEWATRCTRFRVAGRWXSASASAVARPPPPSRSGETAAGSSPPSTTAGAGARRSATCWEASTGSSAPPMSGTPCPRCSAAAGEGTWSARRRASRRSATWTSPTAEVVSATGWRDLATSXATVASCACMWCGY

SEQ ID NO: 437 - DNA, 528 bp, Oryza sativa
atggcggtcgcactcgcgccagggctccgttgccctcgaggacttcatctcgacgttcgcgttcggaggaagtcgtgcgtgtcggagtgctcgctgggcgacgtggacctcgaggccgggctggccgagatcagcaaggccagcccggacacggccgagaggaattgccgcatctgccacctcggcctcgagagcgccgccgccgagtccggctccggcatgttcctcggctgctcctgcaaggacgacctctcctgcgcccataagcagtgcgccgagacctggttcaagatcaggggaaacaggatctgcgaaatctgtggctcaactgcatgcaatgtggtaggtatcggtgatgccgagttcatcgagcagtggaatgaatcaagtaacaccgcggcttcgcaaatgcctgccagtgaacctcggaggttttggcaaggccaccggtttctcaacttccttcttgcttgcatggtgtttgcttttgttatatcttggctctttcacttcaatgtccctggatga

SEQ ID NO: 438 - protein, 175 aa, Oryza sativa
MAVALAPGLRCPRGLHLDVRVRRKSCVSECSLGDVDLEAGLAEISKASPDTAERNCRICHLGLESAAAESGSGMFLGCSCKDDLSCAHKQCAETWFKIRGNRICEICGSTACNVVGIGDAEFIEQWNESSNTAASQMPASEPRRFWQGHRFLNFLLACMVFAFVISWLFHFNVPG

SEQ ID NO: 439 - DNA, 522 bp, Oryza sativa
  misc_feature (402)..(402): y = cytosine or thymine
atggcgggcggcggtcctcgtgctcgtcgtcgccgtcctcggagcggtcatggcgggcggcggcggcacatcctcgccccgctctcctcaccgcctgccccaacgccaagcggcggcggcatcctcgggacctggcggcgcggatctggagcgtcctcgccgtcctcctcaacgacggcggcggtggtggcgcgtcctcgcccgccctcaccggtgacagtggcgcggattggagctggagccggagtcgtcggagtggaaggagttcctgctcgggaatcaaggtcggccttctgcacggcgcgcgttctcgtcctcgcatctctgatcgcggctaaaaacgcagttagcgagcggagcgtaaaggtgggtgtgcctcgcttccgtgcagcgagcgccgtycgccgccgaggcgtcggctgcgcggttgcgtggcgccgtcgcgcctcgcgttctggaagacgtgagctgtggcatgctggcaatcgcccgctatccgtggtaaccccatttcattggtaa

SEQ ID NO: 440 - protein, 173 aa, Oryza sativa
MAGGGPRARRRRPRSGHGGRRRHILAPLSSPPAPTPSGGGILGTWRRGSGASSPSSSTTAAVVARPRPPSPVTVARIGAGAGVVGVEGVPARESRSAFCTARVLVLASLIAAKNAVSERSVKVGVPRFRAASAVRRRGVGCAVAWRRRASRSGRRELWHAGNRPLSVVTPFHW

SEQ ID NO: 441 - DNA, 1965 bp, Oryza sativa
  misc_feature (1843)..(1843): k = guanine or thymine
  misc_feature (1900)..(1900): y = cytosine or thymine
atggcgcggccgcggcgcgcgtcgacgatgcagctggggctgttcctcgccgcgcttctcctcctcacgccgtcgcctgccggctctgtggcggcggccaagggtggcggtgccaagagcggcggcggcggcaccgtgatcgggatcgacctcggcacgacgtactcgtgcgtcggagtctaccggaacggccatgtcgagatcatcgccaacgaccaggggaaccggatcacgccctcgtgggtcgccttcaccgacggcggcgagcggctcatcggtgaggccgccaagaaccaggcggcggccaacccggagcggaccatctacgacgccaagcggctcatcggccggcagttctccgacgccgaggtgcagcgcgacatgaagctgctgccgttcgccgtcgtcgaccggaacggcaagccgcacgaggtgagcgccatggtgctcacgcggatgaaggagacggccgaggcctacctcggcgagaaggtcacccgcgccgtcgtcaccgtcccggcctacttcaacgacgcgcagcggcaggccaccaaggacgccggcgtcatcgccgggctcaccgtcgaccgcatcatcaacgagcccaccgccgccgccatcgcctacggcatcgacaagaagggcgccgagaagaacgtcctcgtcttcgacctcggcggcggcacgttcgacgtcagcatcctcgccatcgacaacggcgtgttcgaggtccttgccaccaacggcgacacccacctcggcggcgaggacttcgaccaacgcctcatggaccacttcgtcaaggtcatccgccggaagcacggccgcgacatcaccggcgacgcgcgcgcgctgggcaagctccgccgcgagtgcgagcgcgccaagcgcgcgctcagcaaccagcaccaggtgcgcgtcgaggtcgagtccctgttcgacggcgtcgacttgtcggagccgctctcccgggcgcggttcgaggagctcaacagcgacctcttcaagaagacgatggtgccggtgaggaaggccatggcggacgcccggctgagcaagggcgacatcgacgagatcgtcctcgtcggcggcagcaccaggatccccaaggtgcagcagctgctcaaggactacttcggtggcaaggagcccaaccgcggcgtcaaccccgacgaggccgtggcgtacggcgccgccgtgcaggccagcatcatcagcggccacgtcgacgagaacacggagagcatgatcctcctcgacgtcgcgccgctcaccctcggcctggagacggccggcggcgtgatggccaagctgatcccgcgcaacacggtggtgccgacgaagaagacgcaggtgttcaccacgtacaaggacaagcagacgacggtgaccatccaggtgttcgagggcgagcggagcatgacgagggacaaccggctgctcggcaggttcgacctcgccggcatcgcgccggcgccgaggggggcgccgcagatcgaggtgacgttcgaggtggacgcgaacggcatcctcagcgtgctggccgccgacaaggccaccggcaggtcggagaagatcaccatctccggcgacgaccgcaagatcagccaggaggagatcgaccggatggtgcgcgaggcggaggagttcgccgaggaggaccgccggcacagggagcaggtggacgcccggaacagcctggaggcgtacgtctacaacatcaagaacacgctcggcggcaagatggcggacgccatggagggcgaggagaaggacagtggaggaggcggtgagggaggcgtacgagtggctggacggcaacccggacgccggcaaggaggaktacgaggagaagctgagggagctggaggacgtgtgcaaccccgtcatgtcggcggtytaccagaggtccggcggcggcggcggcggcgcaccggaagatggcaacgtcgacgacgaggatga

SEQ ID NO: 442 - protein, 654 aa, Oryza sativa
  misc_feature (615)..(615): Xaa = any naturally occuring amino acid
  misc_feature (634)..(634): Xaa = any naturally occuring amino acid
MARPRRASTMQLGLFLAALLLLTPSPAGSVAAAKGGGAKSGGGGTVIGIDLGTTYSCVGVYRNGHVEIIANDQGNRITPSWVAFTDGGERLIGEAAKNQAAANPERTIYDAKRLIGRQFSDAEVQRDMKLLPFAVVDRNGKPHEVSAMVLTRMKETAEAYLGEKVTRAVVTVPAYFNDAQRQATKDAGVIAGLTVDRIINEPTAAAIAYGIDKKGAEKNVLVFDLGGGTFDVSILAIDNGVFEVLATNGDTHLGGEDFDQRLMDHFVKVIRRKHGRDITGDARALGKLRRECERAKRALSNQHQVRVEVESLFDGVDLSEPLSRARFEELNSDLFKKTMVPVRKAMADARLSKGDIDEIVLVGGSTRIPKVQQLLKDYFGGKEPNRGVNPDEAVAYGAAVQASIISGHVDENTESMILLDVAPLTLGLETAGGVMAKLIPRNTVVPTKKTQVFTTYKDKQTTVTIQVFEGERSMTRDNRLLGRFDLAGIAPAPRGAPQIEVTFEVDANGILSVLAADKATGRSEKITISGDDRKISQEEIDRMVREAEEFAEEDRRHREQVDARNSLEAYVYNIKNTLGGKMADAMEGEEKDSGGGGEGGVRVAGRQPGRRQGGXRGEAEGAGGRVQPRHVGGXPEVRRRRRRRTGRWQRRRRG

SEQ ID NO: 443 - DNA, 2031 bp, Oryza sativa
  misc_feature (19)..(19): s = guanine or cytosine
  misc_feature (24)..(24): y = cytosine or thymine
  misc_feature (77)..(77): y = cytosine or thymine
  misc_feature (177)..(177): m = adenine or cytosine
  misc_feature (191)..(191): r = adenine or guanine
  misc_feature (194)..(194): r = adenine or guanine
  misc_feature (1424)..(1424): r = adenine or guanine
  misc_feature (1547)..(1547): m = adenine or cytosine
  misc_feature (1569)..(1569): k = guanine or thymine
  misc_feature (1909)..(1909): m = adenine or cytosine
atgcagctggggcttctcstcgcygcgcttctcctcttcacgtcgtcgctggccggctctgtggcggccgccgcacygccgccgccggcgggggccaagggtggtggtgccaagagcggcggcggcggcggcaccgtgatcgggatcgacctcggcacgacgtactcgtgcgtcggmgtctaccggaacgrccrtgtcgagatcatcgccaacgaccaggggaaccggatcacgccctcgtgggtcgccttcaccgacggcggcgagcggctcatcggcgaggcagccaagaaccaggcggcggccaacccggagcggaccatctacgacgccaagcggctcatcggccggcagttctccgacgccgaggtgcagcgcgacatgaagctgctgccgttcgccgtcgtcgaccggaacggcaagccgcacgtgcgcgtcgaggtgaaggacggcgacgtgcgcgtgttcagcccggaggaggtgagcgccatggtgctcacgcggatgaaggagacggccgaggcctacctcggcgagaaggtcacgcgcgccgtcgtcaccgtcccggcctacttcaacgacgcgcagcggcaggccaccaaggacgccggcgtcatcgccgggctcaccgtcgaccgcatcatcaacgagccgaccgccgccgccatcgcctacggcatcgacaagaagggcgccgagaagaacgtcctcgtcttcgacctcggcggcggcacgttcgacgtcagcatcctcgccatcgacaacggcgtgttcgaggtccttgccaccaacggcgacacccacctcggcggcgaggacttcgaccaacgcctcatggaccacttcgtcaaggtcatccgccggaagcacgggcgcgacatcgccggcgacgcgcgcgcgctgggcaagctccgccgcgagtgcgagcgcgccaagcgcgcgctcagcaaccagcaccaggtgcgcgtcgagatcgagtccctgttcgacggcgtcgacttctcggagccgctctcccgggcgcggttcgaggagctcaacggcgacctcttcaagaagacgatggtgccggtgaggaaggccatggcggacgccgggctgggcaagggcgacatcgacgagatcgtcctcgtcggcggcagcaccaggatccccaaggtgcagcagctgctcaaggactacttcggtggcaaggagcccaaccgcggcgtcaaccccgacgaggccgtggcgtacggcgccgccgtgcaggccagcatcatcagcggccacgtcgacgagaacacggagagcatgatcctcctcgacgtcgcgccgctcaccctcggcctggagacggccggcggcgtgatgaccaagctgatcccgcgcaacacggtggtgccgacgaagaagacgcaggtgttcaccacgtacaaggacargcagacgacggtgaccatccaggtgttcgagggcgagcggagcatgacgagggacaaccggctgctcggcaggttcgacctcgccggcatcgcgccggcgccgaggggggcgccgcagatcgmggtgacgttcgaggtggacgckaacggcatcctcagcgtgctggccgccgacaaggccaccggcaggtcggagaagatcaccatctccggcgacgaccgcaagatcagccaggaggagatcgaccggatggtgcgcgaggcggaggagttcgccgacgaggaccgccggcacagggagcaggtggacgcccggaacagcctggaggcgtacgtctacaacgtcaagaacacgctcggcggcaagatggcggacgccatggagggcgaggagaaggacaaggtggaggaggcggtgagggaggcgtacgagtggctggacggcaacccggacgccggcaaggaggagtacgaggagaagctgmgggagctggaggacgtgtgcaaccccgtcatgtcggcggtctaccagaggtccggcggcggcggcggcggcgcaccggaagatggcaacgtcgacgacgaggatgaccacgatgagctttag

SEQ ID NO: 444 - protein, 676 aa, Oryza sativa
  misc_feature (7)..(7): Xaa = any naturally occuring amino acid
  misc_feature (26)..(26): Xaa = any naturally occuring amino acid
  misc_feature (64)..(65): Xaa = any naturally occuring amino acid
  misc_feature (475)..(475): Xaa = any naturally occuring amino acid
  misc_feature (516)..(516): Xaa = any naturally occuring amino acid
  misc_feature (637)..(637): Xaa = any naturally occuring amino acid
MQLGLLXAALLLFTSSLAGSVAAAAXPPPAGAKGGGAKSGGGGGTVIGIDLGTTYSCVGVYRNXXVEIIANDQGNRITPSWVAFTDGGERLIGEAAKNQAAANPERTIYDAKRLIGRQFSDAEVQRDMKLLPFAVVDRNGKPHVRVEVKDGDVRVFSPEEVSAMVLTRMKETAEAYLGEKVTRAVVTVPAYFNDAQRQATKDAGVIAGLTVDRIINEPTAAAIAYGIDKKGAEKNVLVFDLGGGTFDVSILAIDNGVFEVLATNGDTHLGGEDFDQRLMDHFVKVIRRKHGRDIAGDARALGKLRRECERAKRALSNQHQVRVEIESLFDGVDFSEPLSRARFEELNGDLFKKTMVPVRKAMADAGLGKGDIDEIVLVGGSTRIPKVQQLLKDYFGGKEPNRGVNPDEAVAYGAAVQASIISGHVDENTESMILLDVAPLTLGLETAGGVMTKLIPRNTVVPTKKTQVFTTYKDXQTTVTIQVFEGERSMTRDNRLLGRFDLAGIAPAPRGAPQIXVTFEVDANGILSVLAADKATGRSEKITISGDDRKISQEEIDRMVREAEEFADEDRRHREQVDARNSLEAYVYNVKNTLGGKMADAMEGEEKDKVEEAVREAYEWLDGNPDAGKEEYEEKLXELEDVCNPVMSAVYQRSGGGGGGAPEDGNVDDEDDHDEL

SEQ ID NO: 445 - DNA, 693 bp, Oryza sativa
  misc_feature (290)..(290): y = cytosine or thymine
  misc_feature (295)..(295): m = adenine or cytosine
atgtcgtccgccatcgccgcgccggtcgagcacatcgtggtcatcaaggttccccccgaagccgtcttcgtcgggcgccgccgcggcgatggtgtcatcgctgcaggcgctgtccacggcggtgcccgggctgtcgtacatccacgtcggccccgtggtccgcctccggtcgccggcggcggaggcgctgggtccgacccacgtcctccactcccgctacgccaccaagcccgacctggcggcgtacgcggcgcacccggcgcacgtcgccgccgtgcaggggcacgtcytcccmaacgcgctgactccaccgccatcgactgggtcaacgccgccctggtgccgtccccggtgaacccgggctccgccgtgcggctctccctggcgaagttgaaggagggtgtggaggcgcaccagctcgcggagaagctcgccgcggcgacggcggcggccggggaggcgaagggcgccaaggtgagcttcggggagaacttctcccccgcgcgggccaaggggtaccagttcgggatggtggcggtgttcgacagcgtggaggggctcgacgcggtggacggggacgggaaggtggaggcggccaaggccatagtcaggccgctgctcgacgacgtgctcgagctggaattcgtcgtcggacctgccgccgcggaggctccggcgccggccaacctctga

SEQ ID NO: 446 - protein, 230 aa, Oryza sativa
  misc_feature (97)..(97): Xaa = any naturally occuring amino acid
  misc_feature (99)..(99): Xaa = any naturally occuring amino acid
MSSAIAAPVEHIVVIKVPPEAVFVGRRRGDGVIAAGAVHGGARAVVHPRRPRGPPPVAGGGGAGSDPRPPLPLRHQARPGGVRGAPGARRRRAGARXPXRADSTAIDWVNAALVPSPVNPGSAVRLSLAKLKEGVEAHQLAEKLAAATAAAGEAKGAKVSFGENFSPARAKGYQFGMVAVFDSVEGLDAVDGDGKVEAAKAIVRPLLDDVLELEFVVGPAAAEAPAPANL

SEQ ID NO: 447 - DNA, 702 bp, Oryza sativa
atggcagccaatgttggggaatctacaagcagcggcaccaatggcgatgcagctggggggagctttgaatgcaatatctgctttgaattgccacaagaaccaatagttactctctgtggccacctcttctgctggccatgtatttacaggtggttgcacatccacgcacactctccagagtgcccggtgtgcaaagctgtcgttgaagaggataagctcgttcccctttatgggcgtggcaaggaccgcgtcgatccaaggtcaaagaacatacccgaggctgacattcctaaccgcccaactggccagaggcctgccacagctccacaggccgatcctaacaacaattttgcccatgccaatcctaatgctaatgccaatccatggttcatgggcactggagtaccattggctaatgcacggtgggggaattatgcattctcagctgcgtttggaggcctattccctatgcttagcttccaagtgcatggatttccagatgcaaatccttatgcacagcctgctgggtttcactatgggtatggccatggtcatggattccatggcggacatatgggtcatgccgcccacggtgtccctcgacaaggaccactggagcaaccgcagcaggcagacatctacctgaaggccctgctaatcatggttggatttcttgtggttgcaagccttcttgcattttaa

SEQ ID NO: 448 - protein, 233 aa, Oryza sativa
MAANVGESTSSGTNGDAAGGSFECNICFELPQEPIVTLCGHLFCWPCIYRWLHIHAHSPECPVCKAVVEEDKLVPLYGRGKDRVDPRSKNIPEADIPNRPTGQRPATAPQADPNNNFAHANPNANANPWFMGTGVPLANARWGNYAFSAAFGGLFPMLSFQVHGFPDANPYAQPAGFHYGYGHGHGFHGGHMGHAAHGVPRQGPLEQPQQADIYLKALLIMVGFLVVASLLAF

SEQ ID NO: 449 - DNA, 1617 bp, Oryza sativa; identical to SEQ ID NO: 273
  misc_feature (9)..(9): m = adenine or cytosine
  misc_feature (1019)..(1019): r = adenine or guanine
  misc_feature (1025)..(1025): k = guanine or thymine
  misc_feature (1027)..(1027): r = adenine or guanine
  misc_feature (1033)..(1033): w = adenine or thymine
  misc_feature (1039)..(1039): k = guanine or thymine
  misc_feature (1042)..(1042): k = guanine or thymine
  misc_feature (1044)..(1044): k = guanine or thymine
  misc_feature (1046)..(1046): m = adenine or cytosine
  misc_feature (1049)..(1049): k = guanine or thymine
  misc_feature (1050)..(1050): r = adenine or guanine
  misc_feature (1095)..(1095): s = guanine or cytosine
  misc_feature (1210)..(1210): w = adenine or thymine
  misc_feature (1215)..(1215): m = adenine or cytosine
  misc_feature (1222)..(1222): y = cytosine or thymine
  misc_feature (1238)..(1238): w = adenine or thymine
  misc_feature (1446)..(1446): y = cytosine or thymine

SEQ ID NO: 450 - protein, 538 aa, Oryza sativa; identical to SEQ ID NO: 274
  misc_feature (3)..(3): Xaa = any naturally occuring amino acid
  misc_feature (340)..(340): Xaa = any naturally occuring amino acid
  misc_feature (342)..(343): Xaa = any naturally occuring amino acid
  misc_feature (345)..(345): Xaa = any naturally occuring amino acid
  misc_feature (347)..(350): Xaa = any naturally occuring amino acid
  misc_feature (365)..(365): Xaa = any naturally occuring amino acid
  misc_feature (404)..(405): Xaa = any naturally occuring amino acid
  misc_feature (408)..(408): Xaa = any naturally occuring amino acid
  misc_feature (413)..(413): Xaa = any naturally occuring amino acid

SEQ ID NO: 451 - DNA, 1176 bp, Oryza sativa
  misc_feature (150)..(150): k = guanine or thymine
  misc_feature (800)..(800): y = cytosine or thymine
  misc_feature (998)..(998): y = cytosine or thymine
  misc_feature (1029)..(1029): r = adenine or guanine
  misc_feature (1089)..(1089): y = cytosine or thymine
  misc_feature (1111)..(1111): m = adenine or cytosine
  misc_feature (1114)..(1114): y = cytosine or thymine
  misc_feature (1140)..(1140): k = guanine or thymine
atgcctgcccttccaccaggcttccgcttccaccccaccgacgaggagctcatcgttcactacctcatgaaccaggccgcctccatcaagtgccccgtgccaatcatcgccgaggtcaacatctacaagtgcaacccatgggaccttcckggtaaggctttgttcggcgagaacgaatggtacttcttcagcccgagggaccgcaagtaccccaacggcgctcgccccaaccgcgccgccggctcggggtactggaaggccaccggcaccgacaagtccatcctctccactccgaccagcgacaacatcggcgtcaagaaggccctcgtcttctacaagggcaagcctcccaagggcgtcaagaccgactggatcatgcacgagtaccgtctcaccggcacatcagctaacagcaccaccaccacaaagcagcgtagagcgtcatccatgaccatgaggctggacgactgggtgctgtgcagaatccacaagaagagcaacgacttcaattcctctgaccaacacgaccaagaacccgaggaatcaaccgtcgaacagcttgaagacatccatgacaacaactcctctgaacaacctccagctccagctgacatgaacaaccaacagtcagatttccagcccatgacggcgatgagcatgagcaagtcatgctccctcaccgatctcctcaacaccatcgactgcgccgcgctctcgcagtttctcctcgacggctcatccgacgccatcgctgagcctcctgctcctcccagccccctaatatacacaacacctcatcyaaattaccaaacactaaactataacattaacagcaacagcagcatgccacacgccttcgagtcacgcctagatcatcacgatggttacgttaacaattataatgttaatggcctgaggaggaagagaatgatggcgtgtagtgcaacttcctttgatgatggcagcagcagcagcaatgactttgtgcatgccgttgycaagaaaccgcagctgctgccaagtgattcraggggtagtggttttggaggaggttactgcaaccagcagctttcagagactgcgactggytttcagtttcagaacggcaatmtgytgagccatccatttcctctgaaccakcagctactgctgaacaatcatctgcagatgcagtag

SEQ ID NO: 452 - protein, 391 aa, Oryza sativa
  misc_feature (267)..(267): Xaa = any naturally occuring amino acid
  misc_feature (333)..(333): Xaa = any naturally occuring amino acid
  misc_feature (371)..(372): Xaa = any naturally occuring amino acid
  misc_feature (380)..(380): Xaa = any naturally occuring amino acid
MPALPPGFRFHPTDEELIVHYLMNQAASIKCPVPIIAEVNIYKCNPWDLPGKALFGENEWYFFSPRDRKYPNGARPNRAAGSGYWKATGTDKSILSTPTSDNIGVKKALVFYKGKPPKGVKTDWIMHEYRLTGTSANSTTTTKQRRASSMTMRLDDWVLCRIHKKSNDFNSSDQHDQEPEESTVEQLEDIHDNNSSEQPPAPADMNNQQSDFQPMTAMSMSKSCSLTDLLNTIDCAALSQFLLDGSSDAIAEPPAPPSPLIYTTPHXNYQTLNYNINSNSSMPHAFESRLDHHDGYVNNYNVNGLRRKRMMACSATSFDDGSSSSNDFVHAVXKKPQLLPSDSRGSGFGGGYCNQQLSETATGFQFQNGNXXSHPFPLNXQLLLNNHLQMQ

SEQ ID NO: 453 - DNA, 1050 bp, Oryza sativa
  misc_feature (297)..(297): k = guanine or thymine
  misc_feature (706)..(706): s = guanine or cytosine
  misc_feature (711)..(711): r = adenine or guanine
  misc_feature (717)..(717): s = guanine or cytosine
atggggcggcgcgcgcgctgcctctgcctcctcctcctcctcctcctcgtcgtaggtggcggtttccacgtggccaacgcgcaggcgtcgccggcgccgccacagacgggcacgagggcggtcaaccgcgccgtgtccaccgtcatcaccgtcgtcatcggcgtcttcttcgtcctcgtcttcgtatgcgtcatcgtcaaccagtgctgcgactgcgactcctccgctggcgctggggctgggcaagggcagtcgtcggctgctcggcgccgccgcgggctcgacccggcggcggtkgcggcgatcccggtcgtgccgtacgcggaggtcaggaagcacaggagcggcggcggcggcgcgctggagtgcgccgtgtgcctcaccgtgttcgacgacggggacgacctccgcctcctcccgcagtgctcccacgcgttccaccccgactgcatcgacccctggctcgagggccacgtcacctgcccgctgtgccgcgccaacctcgagaagcagccagcgccgtcgccgcctgccgtggagttctcctcctcgcctgctgcggccgcggcggcggcggaggagtcgcgtacgcccgaggccgcggcggtgcgggttgaggaggtggcggaggcgagcgacgaagaggagacgaggaggagggaggaggaggccctggagctggagagtttgcgcgccgtgcggcggscggcraggatsccgaggtcgaactcgacggggcactcgctgtgcgcgctgccggcgccgcgcgcgccggggccgggcgacggcggtgaccacgagaggttcacggtgcggctgccgccgcacgtccgggaggaggtgctcaagtcgaggcgcctccggcacgccacgagcctcgtcctcggcatcaggggatcgagccgcgagggcagctcgaggggcggcggcgggagctggcacggcgcgcggcggtggccgtccttcctggcaaggacggtgtcgtgggcgcgcggcggcgtgggagcggacaccagcgcgaaggagacgccatgccgtgatgcggtctga

SEQ ID NO: 454 - protein, 349 aa, Oryza sativa
  misc_feature (236)..(236): Xaa = any naturally occuring amino acid
  misc_feature (239)..(239): Xaa = any naturally occuring amino acid
MGRRARCLCLLLLLLLVVGGGFHVANAQASPAPPQTGTRAVNRAVSTVITVVIGVFFVLVFVCVIVNQCCDCDSSAGAGAGQGQSSAARRRRGLDPAAVAAIPVVPYAEVRKHRSGGGGALECAVCLTVFDDGDDLRLLPQCSHAFHPDCIDPWLEGHVTCPLCRANLEKQPAPSPPAVEFSSSPAAAAAAAEESRTPEAAAVRVEEVAEASDEEETRRREEEALELESLRAVRRXARXPRSNSTGHSLCALPAPRAPGPGDGGDHERFTVRLPPHVREEVLKSRRLRHATSLVLGIRGSSREGSSRGGGGSWHGARRWPSFLARTVSWARGGVGADTSAKETPCRDAV

SEQ ID NO: 455 - DNA, 1362 bp, Oryza sativa
atggcgctgaattactcgtcgtgctcgctcaccagctcgttcctgatgaacgaggactgcgctggcatgatgtgtgggtgcgggtgctggtcggaggaggcctcgccgctgtcatccggtggggtgaactccctgtggtgggatgagctggagtttgagctggagctggaagaggaagaggagttcgaccctgtggacctcttgcctaccgaccccttcggcatgaacctggagaccacgttcaccgcggcgatcgccagttgcattgaggacctcacagtcatgtccagtgctgggcgttttggagacagccgcgatgatgctgtttttgccgacctgagttattacttgaataaggcttttgttctatcaccggagtttcagtttggtggctatcggggtgtttttgaaggccccttggggtttggaggcctttctgctggtgaaggtgattcttttgggttcatgaagaacccttcttcctcaggaaatgctgatgattcttttgggttcgtggagacccctcctacctctggaaatgctgcattggagtgcggcgatgcagttgaagttgttcctgtccaggagggaggagttccacatgagggaatgctgtttgcccttgactaccttggccttcgtgacatcctctctgttgagagagtgtgtaagacattgcattcggctgtcagaaatgagcccttactgtggaagtccatccacattgaaggggatttgcgccagagaatttctgatgctggtcttctacacctgacacagaagtgcccagatactttgcagtgtctaagtattgcgtgctgcgtaaatatcacagaccaggggctgaaggctgttttagaaagtaatccaagattaacaaagctgagcattttgggctgcccacggttaactttggatggccttatttccaatctcaagtcatttaatacgaaggcggtgtttggaattaagcacctcagagttggaacactcttcagtttacgaaaggagcagtacgaagagttattatccttgttgaataccgacaagacacaggaggtgcataaccgggggccaagattccttcatgctaatcggtttttatcagattgcaatgatggatatgctcttgatattgagatgtgccctatttgtcagaactacaaacttgtttatgattgcccagatgaaggatgtgatgacagaagatctggtaattgcaaaggttgtactgtttgcatactgagatgttatgagtgtggaaggtgtgtagacaagttggcattcaaggagtcattttctctggactgggtttgccctaattgtcaagagaagaaggatctgtctcccccaatgaaatag

SEQ ID NO: 456 - protein, 453 aa, Oryza sativa
MALNYSSCSLTSSFLMNEDCAGMMCGCGCWSEEASPLSSGGVNSLWWDELEFELELEEEEEFDPVDLLPTDPFGMNLETTFTAAIASCIEDLTVMSSAGRFGDSRDDAVFADLSYYLNKAFVLSPEFQFGGYRGVFEGPLGFGGLSAGEGDSFGFMKNPSSSGNADDSFGFVETPPTSGNAALECGDAVEVVPVQEGGVPHEGMLFALDYLGLRDILSVERVCKTLHSAVRNEPLLWKSIHIEGDLRQRISDAGLLHLTQKCPDTLQCLSIACCVNITDQGLKAVLESNPRLTKLSILGCPRLTLDGLISNLKSFNTKAVFGIKHLRVGTLFSLRKEQYEELLSLLNTDKTQEVHNRGPRFLHANRFLSDCNDGYALDIEMCPICQNYKLVYDCPDEGCDDRRSGNCKGCTVCILRCYECGRCVDKLAFKESFSLDWVCPNCQEKKDLSPPMK

SEQ ID NO: 457 - DNA, 11919 bp, Oryza sativa
  misc_feature (4425)..(4425): y = cytosine or thymine
  misc_feature (8000)..(8000): w = adenine or thymine
atgtcgataatgcggagcagtgactgggaagtgctttgcagatcgaaagtatcttgtcaagctgtgctggtatcagcacctcagcagttcatacaagtgctttttggcgactgtgagagtacacatcttgatgctgttactcgacactacaagagcatagcgctcagagttgcaactgtaattcagaatttagggaatttatcggtttggacaatttacttctgcttatcactgacagttatggcctggaagcctggaatgtggtgtatggctaaaaatatgcaaggtgatgtagaactcacgaacatgcagttgaagcctgaggctctcaattcattaaagttacctgtgagggtgaaagctggttttcttggttcagtgaagctcaaggtcccgtggagcaggcttggtcaagagccagttttggtttatcttgatcgaatatttatattagctgaaccagcaacacaagttgaaggttgcagtgaggatgccgttcaagaggcaaaaagaagtagagtcagggaaatggaaatgaagttattggagagccaacaacagctgaaatctgaactgaattcgtcatggcttgggtctttcattagcactgtaattggaaatattaagttgtcaattagcaatattcatatcagatatgaggacacagagagcaatccaggccacccttttgcagcaggtttggcactctcaaagctttcagcatttactgtggatgatcgtggaaaggagacttttgccacaggcggggatttggaccgagttaagaagtcagtcgaacttgagagcctggcattgtattttgattctgatagcagtccttggagtgtggataagtcctgggaagatctattaccttcagaatggagtcagatttttgagttcagaaagcaggacagttctaatcctccttcaaaaacacacacttacattttacgacctatctctggcaaagccaaatatacgaagatacaacttgatgaagcaaagaaaaccggacaggctttgcaaaatgcagctgttgatttggatgacgttactttgtctttgtctaaggatggctacagggacgtcttgaagatggctgataatttttcttcttttaatcaacgtctcaaatatgctcactaccggccatctttgccagtcaaatctgacccaaggtcttggtggaagtatgcatacaaggtggtggttcatgaaacaaagaaagcaagtggaaatctatcatgggagcaactactgaaaaatgcaagacttagaaagacatatgtatctgtatatgcatccttattgaaatctgacatgagccgattggttgttgatgataacgaggatataaagaaacttgatcgtgaactagatatagaagtcattttacaatggaggatgttggcccacaagtttgtagagcagtcagcagaaacacatcaatatgctcaacaaaataagcagcagtcctggtggtcatttggatggactggctcttcaaaggatgagggagactcaaagagttttagtgatgaagattgggaaagattgaataggattattggctacaaagaaaatgatgactatattcctgttcaacaggatatgaaattgatgcagttctattttgaaatacgcatgaagcataatgcatcgaagcttatcatcgataactcagagtatcttgctgatctgtcatgtgaagatttctgttggtgcttttacctgaaaattgaaattcatttgacaccaagagtagcccttaccattagccagactctggcgatagagactgctgctgctgtgcaggagatatgggattcccgtgcttcagaagagcaggatatgtatctgaatttcaatctagtgctaagtgatgtatctgcatttttagtggatggtgattaccattggaatgaaagatccaatgaagtaaatttattgtcagttatcgacaagtgtggaattgctttaaagcttcagcagatccagttagaaagtgcactatacccttctacaagaatggcagtacgggttccatccctgggttttcatttctctccagcacgttatcataggttaatggaaattttcaagatttttcaagataatgatagcgacaaaaacagttcagatcttgcacatttgtgggatcaggctgactttgagggatgtaaaactgttaatatctatgaatgtttttgttatgagccactagtagttttcagcgtatatttgcggagaggatctttatcgcaacttttaattcttgaagacactggcgctttgattatgttgtttgacaatgaggaagcacgaaggatatggcagaaccgcttgcagggtgctatataccgtgcatcgggttctgccgcactttccagctttcctgaagttgcattcccatcagagacccattccttcaagggcagctttcaagatgttagcattgaaaaattgttcgttgctggcattcttgatgagctaaagatctgcttctcatgtggctatgagagcaaccacaaactcaaaaaagttctgctagctaaggagagcagcttgtttgaatttcgggcagttggtggccaggttgaactctcaatgaagggtggcaatctactaatcggtactatcttgcgatctctggaaattgaagatcagtataactaccctggtagtcctgtaccaaggtatttggcgagatcctttatcaatagcgtgcaaaccaacgaagtcccaactcctagtcgaaagaatagtgcaggacctagaggtactgcactgaagaaaagtgacagtgaagaaaggttttttgaagcatcagatgattttgatgaatttgaaacacctatgctgcatgagaggagtatatcagattatttcagcacacagaactttttgcctactagcctcccttctttgcagccacctgcattcagtcgaattcctggtttgctgccagatattgagcttcaatctgccggattcacttcaggggacattacttttgaaagttttgtgaaagctcagattgtgatttatgatcagcagtcccctcaatacaacaacttggataacagggttgtgataagtgttgctactctgacctttttctgtcatcgaccaactgttattgcaatcatggaatttatgaatgccatcaaccttgcaaatgtccctgatgctgataaaaataaagatacaacatcggatcctgtagaacataatatggttgaggaacctaagtctgatctggaagcaggaccagtcataaaaagattactggctaaaggtaaaagcagaacagtttttcatctaacatcaagcatggcagaggcacaaatattattaatgaatgaaaatggtgaccggcttgctactttatcacaaaataacctctcaactgatataaaggtgttcacatcgtcgttcagtatagaggctgcacttggaaaccttaaaataagcgatgacagtctttcttgcaatcatccctacttttgggtttgtgatatgcgtaatccaggaggaagttcttttgtggagattgactttagttcatacaatgttgatgacgaagactatagtgggtatgactatagtctatcagcgcagctttcagaagttagaattgtttatctcaaccgttttgttcaagagattatcaattatttcatgggccttgttcctaagagctctgatagtgttgtaaagctaaaagacaatgtaactaactcagagaagtgggttagcaaaactgatatggaaggatcacctgctctcaaattggatgtctctttcagtaggcctataattgttatgcctcgtgaaactaatagttctgatttcttggagcttgatgttctatacataaagatccaaaataaattccaatggatcggtggtgacaagaatgagatgagcgctattcatctagaaattttaacggttacgagcagaaaaataagtgggattctgggaattgtacttccttatgatgattacgctgtattccttatatctgttgagaacatatattttttggacaagaaagtaaaggacataaatctaactattggtatgaatatggtgtgtggtgaaactataattcaagatgtggaaggtctctccttcgagatccatagatcattacgtgacctgatgcatcagttaccagcggtggaggcttcaattaaggtggatgttctgaaagcagcgttatccaatcgagaatatgaaattatatctgaatgtgcattgtcaaacttctccgagacaccacatgttgtgcctgctcttgatgatcctcgatatggaactactacagctgaatctcatgtatcttcatcttcttcatctgaaagtattcaagatttgtctcaagatgcggagacatggataactaataaaatatcygtttcgataaatctggttgagctttctcttcattcaggatcgacaagggactcacctatggctagcatgcaggcaagtggcgcatggcttctgtataaatcaaatacgagggaggagagctttctttttgctactctcaaaggcttttctgtttttgatgaccgtgaaggaacaaaagatgagttaaggcttgccattgggaaatcagcaacagttagagacacatcatctgctgatggctatgataatcctaatgaacttgattcaggtgaacgaagaatacaaaaagatctaggccttgagccaatcccctcaatgctcatttttgatgctatcctgcgaaaatcttcgtcaactgtgtctgtgtgtgttcagcgtcccaagtttcttgtggcacttgatttcttgctagcaattgtcgagttctttgtgccatctgctcgtagtctgttatctaatgatgaagataaggaccttctgcacatgacttctccactggtattcagtgatcaagtttactatcaggagcgttccactatgagtatttcacctcagaaacctctgattgttgataatgagaagttcgactactatatatatgacggaaaaggtggcaaaatatatttgcgggatagggagggaaaaattctgtcaggccctagtgctgaaagattcattcatgtgctctgtgaatggtattgctctgaacatctagctatacctgaggctattggaccagagcttactttctacagcacatcaagaaattctggtgaaaatttagcactatcaactaaggttattcatgcccgtacagatgcattttgcaggcttataatgaagggtgacagtatggagatgagtggaaacatactcggtttaaagatggagagtaatggcatcagagttatagaaccgtttgacatgtctgtgaaatattcaaacgcatctgggaagacaaatttgcatctgctggtttctgagatttatatgaatttctccttcagtattctgaggctgtttttagctgttgaggaagaaatttcagcatttctcaggatgtcatctaagaaaatgtcactgatgcctcaagttttaaggagattgattcttttttctaggtggaatgactctcctactaaaggagttcttgctttgaacacaaacattgtaagggtcaaaaggcctttgtcatacaaactagtttggcgatctggacctccacaaacaaatgaacttcaacacagtgagaaagatttgaagaacaagccttctaatgttgaccggttctgctcagtttggttacctgtagcacctgtgggctatgttgcattgggttgtgtttcttcaactggaactgctgaaccacctttatcgtcagttttttgtttgtctgcttccttggtttcttcatgtggcctaagggattgcattccactgagcggtaatgccaatatgtcattctggcgggttgataatgcttttggttcctttttacccggagatccagcacatatgcgtgtagatggaaatgcatatgatcttcgccatatgctgttcaatgatgcggactcttccaagactagctctatagggcaagatagtcacaatgatgcttcgcagatagagagatcagcattgacctcaggtcggctatttgaagcagtagcaagctttaaactaatttggtctaataatggcatgtcttcaccaaagaaactatctatatggcgtccaatgttgtctgaaggaatgttttactttggtgacattgctgttaacgggtatgagccaccaaattcagctgttgtacttcgaaattctggcgatgatacctttctcagagctcctgaaggttatcagcttgttggtagaattaagaagcacaggggtactgagggtgtatcgttttggtttcctcaagctccaccaggttttgttgctttaggatgtgttgcatctaaaagttcaccagcgaaagaggacttgcatttcttaagatgtattagaagtgacatggtgaagggaggccaattttcggaggaaagcgtgtgggactcatctggtgctagaacatctgaaagttttagcttatggaccgttgataatgatgttggtacatttcttgttagaagtggatttagaaaacctccaagaagacttgccctgaagcttgctggtccacctacatccagcagttcagatagcataattattgatgctgaaatcaaatcattttctgcagtttcatttgatgattatggaggaatgatggtaccattatttggaatatcatttaatagtgtggggtttagttatcatggtggtcctcaacatctaaatgctactgtgggtttgtcatttgcggcaagatcttataatgacaagtataattcatgggagcccttcattgaaccaactgatggctttcttaggtaccaatatgacatgaacacaccaggttctccagggcaacttcgtattgcctcaacacgagatctgaatatgaacatatcagtttccaatacaaacatgttatcacaagcttatgctagctggaacaatattagccttggcaatgagttatacaggatggaaacgtcttctactagtgaaaggtcgattcttgatgtgcacgaaagaagaagttattatgttatcccacaaaacaaacttggccaagacatatacattagaaccactgaatataggagttcagatgttacacttctgtcatctggggatgataggtctataaaagttccagcttcaagggatcttctggattctcatttaaaggggagatctgttaggttatatcgcttgatggttactgctattattgccaatgctgagattaaggttggtgaaggactagccactggtgaatatatggtagcactacggatctattcagaagattgtattgcatctggtgttcagcaacaaagtgctcgtacctgtgctgctgctggagaccaatcttcacaaaacataagaaaggtggaatggaatgaaatgttcttctttaaagttgaaagcgaggataattatgttctggaatttgttgttcttgatgctggtggaggccaaccagttggtatttactctactccattgaagcaagtggtgcagaagcttccttctgcctctggttctaactatgcaaaatttgatttgactttaggaggtcttacttcaaccaaaacagtggaacatgaaactgttaaatctagtggaaaaataagatttgcagtgcttatttctggtagggctagcacaaaacaggggtgtagagccaatcaggccagaagcaaggctggatacattcaaattagtccctccaaagaagggccttggacaaatatgaagctaaactatgctgtaccagcagcatgttggaggtttggcaattgtgtgattgctagtgaagctacagtcaaggagggcaatagatatattagcatgcgctcccttgtatcaattactaacacgactgattttattgtcgacttgcgcctaaaaggacgatattctcgaagttctcaatcagatggacagggtgagaattctawtaaagatgatcacatttctgttggacttctagagcctggttctactgctccaatccccctgtcaggtatctcaaatcctgttgtgctttatacgctgcaactaagaccaacaaatcatcatgagctagtgcagtactcctggagtgatgttcaggagagacgcagccaaactgagtaccgcaatgaggagatccttgacatatttgtatctgatctgtatgaatcagagaacttactgttctgtgcgcaatcagatggcacttccagtacttctcaagggctatggttttgcttaagtatagaagccaaggaaataggcaaagatgttcacacaaatccaatatatgactggagcatcattatcagatcaccattgtctttatcatactatcttcccatttctgcacattatgttcttagtgctagccaccttgatgaggaagatacaagttgttcgcagggtaccttaaatcctggtgaggtggttagggtccaaaatgttgatccaaggaatcctttgtacttgtcacttgttccacatgggggatggacatcacatgaacctgttcctatatcacatcccaccgtagctccatcaaaatttattaatctaagaagttctctatctgaaaggattgtacagattgtacttgaacaaagcagcgataaggactatttgatggcaagagctatcagaatatatgttccctattggatatcttttgcaagactgcctccgattaacctgcaattaattgatatctctggaagaaaagacaagaggcgttttcttgcacgccctcgttcagaaaggagcgagaaaatactttatgaaataaaccatgaagaattggttgaaggatacactatagcatctggtttgaacttcaaaggcttagggctctcagcaagtgcctgcagacatgggagtggacagtttggattgctcaaagaactatcacctcttggcgacatggatggtgctgttgatatttctgcctatgatgacgatggaaaatgcacacatattcttctttgctcaaaaccatcctcatatcaggctgttccaacaaaggttatctatgtacgcccatacataacattcacaaacagggctggacaagatttttacataaaacttagtgctgaagatgagccaaaggtgctacatgcacatgactggagggtttcttttatgcactcagaaggaggaactgaaaaattgcagcttagatttggttatgcaaaccactgttatttgaaaatgtgtggctgtatggtccggcttgtggatactgactggtgtcagcctctggatatagtaaaagaagacaccattgttatagtaatgagaaagcaggatggtacccagaaatttataaaagctgagatacgtggctatgaggaaggttcaagattcttgattgtatttcgtttggggccatcagatggaccaatcaggattgagaaccggacaagtagtacaactatcagtgctcgacagtctggtttgggagaggattcttggatacaagtgaaaccactttcaaccaaaaaatattcttgggatgacccatatggacatacaacttttgatgttagcatccagcaaggagatgttactttctttcagtgtgttgacctggaaaaccctgatgaatgttccgctggttttagagaacatcacctcaagctcagtatagttgagactgctgatgttaagattttgaagtttgctgattacccaagaagacaagagggagggtacagatctgatctgggtgatcaccaagcctcgccagttatgcaaaatgatacagatacaggtgctggactattggaacttattgttgaacttggagttgttggagtctctttgattgatcataaaccgagagagcttttgtacttacatctgcagaagctttttatttcatacatgactggttacaattctggtaccactagcaggtttaagttaattattggccatatgcaactagataatcagttgccattgtctataatgcctgttgctttggcaactgagagcatgcctgactcaaaccatcctgtatttaaagcaaacatcgccgtaactgatcaaacatggaggttgaatattcatgaacctattatttgggcattggttgatttctacagcaatcttcgttttgtcagcaccaacaacatctcaactgtaacagaagtggatcctgagatacgaatagagcttgttgatatatcggagataaggttgaaaatatctctggaaactgcgcctactcaaagaccacgtggtgtccttggcatatggagccctgtcctatcagctgtaggcaatgcacttaagattcaggtgcatctgcgtaaggtcatgcacagaagtcgttacatgcggaagagttccatcattcccgcaatcacgaaccgaatcaagagagatctgatccacaatcctctgcacctaatattttcagtagattttcttggagtgacaaaatcaactttgtcatcacttagtaaagggtttgcagagctctctactgatgggcaatttcttcagctgagatcaaagcaggtttggtcaaggagaataactggtgttggtgatggactagttcaagggactgaagcatttgctcagggtttggcttttggggtttctggtgttctaagaaagccagtcgagagtgcccgacagtatggtgcaattggcattgcacatggtcttggccgtgcttttgtggggtttattgtccaacccttaagtggggcctttgatttcttctcattgacagttgatggaattagtgccagctttatgagatgcgtggatattctgaataataaacatgtccctcagaggattagagatcctcgtgctatacaccgagatggtataataagagagtacgacaaagtacaagctgcgggccagatggccctttacctagcagaggctagcagatattttgcatgcacagatttatttcgggaaccttcaaagtatgcatggtcagattactatgaagatcattttatcgtacaaaatcagaaggttgctttggtaacaaacaaacgagtgatactgcttcagtgcgtggatctagataaaatggataagaagccttcgaaaatactttgggacgttccttgggaagatgtgcttgcattggagctggcaaaagctgggtatcaaaggccttctcacgttcctgggggccagcacgatgtatatttcgcatttgatgaagatatgagggagttccacagttttgctaggcctttgctaagcccaaggggagcagcaagtaatgttgaggagcgactcattaacgatacagttaacttccagaacatgtggagcagtgaacaagaaattcgaagcagatgcaaactactttcaaagcaggttgcagatgatggaagggtgtttagtatctggaggcctctctgccctagtgggtatgtctcaatcggagatattgctcatgttggcattcatccaccacatgttgctgctgtctacaaaaatgtgggtggaaatttcgctctgccacttggctatgacctggtttggagaaactgtggtgaggattacaggaatcctgtatcaatatggtttccacggccacctgaaggatacgtagctctcggatgcgtggctgtatctgcttttgaggagccccctctcgactctgccttctgtgttagtgagagatttgcggaagatgcagtatacgaggagcaaattgtatgggcttcgtcagatgcctacccatggggatgctatgtttaccaagttcagagcaagtcactgcaattcatggcgatgcggcggccaaaagaagagtgtgagctaaaacctaagaaggtatcagagtcttatgcccagcaagcattggagaggtcctga

SEQ ID NO: 458 - protein, 3972 aa, Oryza sativa
  misc_feature (2667)..(2667): Xaa = any naturally occuring amino acid
MSIMRSSDWEVLCRSKVSCQAVLVSAPQQFIQVLFGDCESTHLDAVTRHYKSIALRVATVIQNLGNLSVWTIYFCLSLTVMAWKPGMWCMAKNMQGDVELTNMQLKPEALNSLKLPVRVKAGFLGSVKLKVPWSRLGQEPVLVYLDRIFILAEPATQVEGCSEDAVQEAKRSRVREMEMKLLESQQQLKSELNSSWLGSFISTVIGNIKLSISNIHIRYEDTESNPGHPFAAGLALSKLSAFTVDDRGKETFATGGDLDRVKKSVELESLALYFDSDSSPWSVDKSWEDLLPSEWSQIFEFRKQDSSNPPSKTHTYILRPISGKAKYTKIQLDEAKKTGQALQNAAVDLDDVTLSLSKDGYRDVLKMADNFSSFNQRLKYAHYRPSLPVKSDPRSWWKYAYKVVVHETKKASGNLSWEQLLKNARLRKTYVSVYASLLKSDMSRLVVDDNEDIKKLDRELDIEVILQWRMLAHKFVEQSAETHQYAQQNKQQSWWSFGWTGSSKDEGDSKSFSDEDWERLNRIIGYKENDDYIPVQQDMKLMQFYFEIRMKHNASKLIIDNSEYLADLSCEDFCWCFYLKIEIHLTPRVALTISQTLAIETAAAVQEIWDSRASEEQDMYLNFNLVLSDVSAFLVDGDYHWNERSNEVNLLSVIDKCGIALKLQQIQLESALYPSTRMAVRVPSLGFHFSPARYHRLMEIFKIFQDNDSDKNSSDLAHLWDQADFEGCKTVNIYECFCYEPLVVFSVYLRRGSLSQLLILEDTGALIMLFDNEEARRIWQNRLQGAIYRASGSAALSSFPEVAFPSETHSFKGSFQDVSIEKLFVAGILDELKICFSCGYESNHKLKKVLLAKESSLFEFRAVGGQVELSMKGGNLLIGTILRSLEIEDQYNYPGSPVPRYLARSFINSVQTNEVPTPSRKNSAGPRGTALKKSDSEERFFEASDDFDEFETPMLHERSISDYFSTQNFLPTSLPSLQPPAFSRIPGLLPDIELQSAGFTSGDITFESFVKAQIVIYDQQSPQYNNLDNRVVISVATLTFFCHRPTVIAIMEFMNAINLANVPDADKNKDTTSDPVEHNMVEEPKSDLEAGPVIKRLLAKGKSRTVFHLTSSMAEAQILLMNENGDRLATLSQNNLSTDIKVFTSSFSIEAALGNLKISDDSLSCNHPYFWVCDMRNPGGSSFVEIDFSSYNVDDEDYSGYDYSLSAQLSEVRIVYLNRFVQEIINYFMGLVPKSSDSVVKLKDNVTNSEKWVSKTDMEGSPALKLDVSFSRPIIVMPRETNSSDFLELDVLYIKIQNKFQWIGGDKNEMSAIHLEILTVTSRKISGILGIVLPYDDYAVFLISVENIYFLDKKVKDINLTIGMNMVCGETIIQDVEGLSFEIHRSLRDLMHQLPAVEASIKVDVLKAALSNREYEIISECALSNFSETPHVVPALDDPRYGTTTAESHVSSSSSSESIQDLSQDAETWITNKISVSINLVELSLHSGSTRDSPMASMQASGAWLLYKSNTREESFLFATLKGFSVFDDREGTKDELRLAIGKSATVRDTSSADGYDNPNELDSGERRIQKDLGLEPIPSMLIFDAILRKSSSTVSVCVQRPKFLVALDFLLAIVEFFVPSARSLLSNDEDKDLLHMTSPLVFSDQVYYQERSTMSISPQKPLIVDNEKFDYYIYDGKGGKIYLRDREGKILSGPSAERFIHVLCEWYCSEHLAIPEAIGPELTFYSTSRNSGENLALSTKVIHARTDAFCRLIMKGDSMEMSGNILGLKMESNGIRVIEPFDMSVKYSNASGKTNLHLLVSEIYMNFSFSILRLFLAVEEEISAFLRMSSKKMSLMPQVLRRLILFSRWNDSPTKGVLALNTNIVRVKRPLSYKLVWRSGPPQTNELQHSEKDLKNKPSNVDRFCSVWLPVAPVGYVALGCVSSTGTAEPPLSSVFCLSASLVSSCGLRDCIPLSGNANMSFWRVDNAFGSFLPGDPAHMRVDGNAYDLRHMLFNDADSSKTSSIGQDSHNDASQIERSALTSGRLFEAVASFKLIWSNNGMSSPKKLSIWRPMLSEGMFYFGDIAVNGYEPPNSAVVLRNSGDDTFLRAPEGYQLVGRIKKHRGTEGVSFWFPQAPPGFVALGCVASKSSPAKEDLHFLRCIRSDMVKGGQFSEESVWDSSGARTSESFSLWTVDNDVGTFLVRSGFRKPPRRLALKLAGPPTSSSSDSIIIDAEIKSFSAVSFDDYGGMMVPLFGISFNSVGFSYHGGPQHLNATVGLSFAARSYNDKYNSWEPFIEPTDGFLRYQYDMNTPGSPGQLRIASTRDLNMNISVSNTNMLSQAYASWNNISLGNELYRMETSSTSERSILDVHERRSYYVIPQNKLGQDIYIRTTEYRSSDVTLLSSGDDRSIKVPASRDLLDSHLKGRSVRLYRLMVTAIIANAEIKVGEGLATGEYMVALRIYSEDCIASGVQQQSARTCAAAGDQSSQNIRKVEWNEMFFFKVESEDNYVLEFVVLDAGGGQPVGIYSTPLKQVVQKLPSASGSNYAKFDLTLGGLTSTKTVEHETVKSSGKIRFAVLISGRASTKQGCRANQARSKAGYIQISPSKEGPWTNMKLNYAVPAACWRFGNCVIASEATVKEGNRYISMRSLVSITNTTDFIVDLRLKGRYSRSSQSDGQGENSXKDDHISVGLLEPGSTAPIPLSGISNPVVLYTLQLRPTNHHELVQYSWSDVQERRSQTEYRNEEILDIFVSDLYESENLLFCAQSDGTSSTSQGLWFCLSIEAKEIGKDVHTNPIYDWSIIIRSPLSLSYYLPISAHYVLSASHLDEEDTSCSQGTLNPGEVVRVQNVDPRNPLYLSLVPHGGWTSHEPVPISHPTVAPSKFINLRSSLSERIVQIVLEQSSDKDYLMARAIRIYVPYWISFARLPPINLQLIDISGRKDKRRFLARPRSERSEKILYEINHEELVEGYTIASGLNFKGLGLSASACRHGSGQFGLLKELSPLGDMDGAVDISAYDDDGKCTHILLCSKPSSYQAVPTKVIYVRPYITFTNRAGQDFYIKLSAEDEPKVLHAHDWRVSFMHSEGGTEKLQLRFGYANHCYLKMCGCMVRLVDTDWCQPLDIVKEDTIVIVMRKQDGTQKFIKAEIRGYEEGSRFLIVFRLGPSDGPIRIENRTSSTTISARQSGLGEDSWIQVKPLSTKKYSWDDPYGHTTFDVSIQQGDVTFFQCVDLENPDECSAGFREHHLKLSIVETADVKILKFADYPRRQEGGYRSDLGDHQASPVMQNDTDTGAGLLELIVELGVVGVSLIDHKPRELLYLHLQKLFISYMTGYNSGTTSRFKLIIGHMQLDNQLPLSIMPVALATESMPDSNHPVFKANIAVTDQTWRLNIHEPIIWALVDFYSNLRFVSTNNISTVTEVDPEIRIELVDISEIRLKISLETAPTQRPRGVLGIWSPVLSAVGNALKIQVHLRKVMHRSRYMRKSSIIPAITNRIKRDLIHNPLHLIFSVDFLGVTKSTLSSLSKGFAELSTDGQFLQLRSKQVWSRRITGVGDGLVQGTEAFAQGLAFGVSGVLRKPVESARQYGAIGIAHGLGRAFVGFIVQPLSGAFDFFSLTVDGISASFMRCVDILNNKHVPQRIRDPRAIHRDGIIREYDKVQAAGQMALYLAEASRYFACTDLFREPSKYAWSDYYEDHFIVQNQKVALVTNKRVILLQCVDLDKMDKKPSKILWDVPWEDVLALELAKAGYQRPSHVPGGQHDVYFAFDEDMREFHSFARPLLSPRGAASNVEERLINDTVNFQNMWSSEQEIRSRCKLLSKQVADDGRVFSIWRPLCPSGYVSIGDIAHVGIHPPHVAAVYKNVGGNFALPLGYDLVWRNCGEDYRNPVSIWFPRPPEGYVALGCVAVSAFEEPPLDSAFCVSERFAEDAVYEEQIVWASSDAYPWGCYVYQVQSKSLQFMAMRRPKEECELKPKKVSESYAQQALERS

SEQ ID NO: 459 - DNA, 360 bp, Oryza sativa
  misc_feature (165)..(165): s = guanine or cytosine
  misc_feature (189)..(189): k = guanine or thymine
  misc_feature (233)..(233): r = adenine or guanine
  misc_feature (267)..(267): s = guanine or cytosine
atggggcctcagcaagaccggtcggcggccaagccgtacgcgaacggcagcacggcggcggcggcggcggcggggaggaaggagaacaacaaggtggtgcggtacagggagtgccagcgcaaccaagccgccagcatcggcggccacgccgtcgacggctgccgsgagttcatggcgtcgggcgccgakggcaccgccgccgcgctcctctgcgccgcctgcggctgccaccrgagcttccacaggcgagaggtggaggccgccgcsgccgaatgcgactgctcctccgacacctcctccggcaccggccgccgatttttgcagcagttggtactttcttggtggttatcatctgcttag

SEQ ID NO: 460 - protein, 119 aa, Oryza sativa
  misc_feature (63)..(63): Xaa = any naturally occuring amino acid
  misc_feature (78)..(78): Xaa = any naturally occuring amino acid
MGPQQDRSAAKPYANGSTAAAAAAGRKENNKVVRYRECQRNQAASIGGHAVDGCREFMASGAXGTAAALLCAACGCHXSFHRREVEAAAAECDCSSDTSSGTGRRFLQQLVLSWWLSSA

SEQ ID NO: 461 - DNA, 771 bp, Oryza sativa
atggacttcgagccactcccctccgccgccggcgacgccaccgccgacgagactcctcccggtcgcgccgtctgcagctccggctgcggccgcccgtccaccgtctgcctctgcccataccttcccgccaccccgctccccacctccaccaccgtcgtcgtcctccaccacccgcacgccctccgccgcaacccgctctccaccctccccctcctcgcccgctccctctccaacctccgcctcatccccggccgccgcctcctcccttcctccggccccctcatcccgaaccccgtcctcctgctcttcccttcgccgggcgccgccgacctcgcttcctggtgccgatccacgcctcccgcggcgcgcgccaacccgacgctgctactgctcgatgggacatggaagcaggccaaggagatgcacgccgccagcctcccgttcctgtcctccttcgccgtccccgtctcgctgcccgtcgactgcggcgttgacggcgacagcatgttcgaggggaagcttgtggtgaagaaggagccgcacaaggggtgcgtgagcactatggaggccgtcgcgagggctctgcggctgctggagccggaggggaggggagcagagatcgaggagacgatggtgggggtgctcagggcgatggttgccttccaggctgagcatttgcagcatcggccgatgaaaccgagggtgaagatgaggaagaagaaggatatcaagagggaggaagagatgaagagggatgccagattggaatga

SEQ ID NO: 462 - protein, 256 aa, Oryza sativa
MDFEPLPSAAGDATADETPPGRAVCSSGCGRPSTVCLCPYLPATPLPTSTTVVVLHHPHALRRNPLSTLPLLARSLSNLRLIPGRRLLPSSGPLIPNPVLLLFPSPGAADLASWCRSTPPAARANPTLLLLDGTWKQAKEMHAASLPFLSSFAVPVSLPVDCGVDGDSMFEGKLVVKKEPHKGCVSTMEAVARALRLLEPEGRGAEIEETMVGVLRAMVAFQAEHLQHRPMKPRVKMRKKKDIKREEEMKRDARLE

SEQ ID NO: 463-500 - skipped (38 entries)

SEQ ID NO: 501 - DNA, 690 bp, Oryza sativa
atgtcgtccgccatcgccgcgccggtcgagcacatcgtgctcatcaaggtccgcccggaggcggcgtcgtcgggcgccgccgcggcgatggtgtcatcgctgcaggcgctgtccacggcggtgcccgggctgtcgtacatccacgtcggccccgtgctccgcctccggtcgccggcggcggaggcgctgggtccgacccacgtcctccactcccgctacgccaccaagcccgacctggcggcgtacgcggcgcacccggcgcacgtcgccgccgtgcaggggcacgtcctccccaacgcgctcgactccaccgccatcgactgggtcaacgccgccctggtgccgtccccggtgaacccgggctccgccgtgcggctctccctggcgaagttgaaggagggtgtggaggcgcaccagctcgcggagaagctcgccgcggcgacggcggcggccggggaggcgaagggcgccaaggtgagcttcggggagaacttctcccccgcgcgggccaaggggtaccagttcgggatggtggcggtgttcgacagcgtggaggggctcgacgcggtggacggggacgggaaggtggaggcggccaaggccatagtcaggccgctgctcgacgacgtgctcgagctggaattcgtcgtcggacctgccgccgcggaggctccggcgccggccaacctc

SEQ ID NO: 502 - protein, 230 aa, Oryza sativa
MSSAIAAPVEHIVLIKVRPEAASSGAAAAMVSSLQALSTAVPGLSYIHVGPVLRLRSPAAEALGPTHVLHSRYATKPDLAAYAAHPAHVAAVQGHVLPNALDSTAIDWVNAALVPSPVNPGSAVRLSLAKLKEGVEAHQLAEKLAAATAAAGEAKGAKVSFGENFSPARAKGYQFGMVAVFDSVEGLDAVDGDGKVEAAKAIVRPLLDDVLELEFVVGPAAAEAPAPANL

SEQ ID NO: 503 - DNA, 720 bp, Oryza sativa
atggcgagcccgcagtgctgcgcgaacccaccgacgctgaacccggccggcggggaggggaaggtggtggagagcttcggcgggatcaaggcgtacgtcgccggcgccgcggagtccaaggccgccgtcgtcctcatctccgatgtcttcgggtttgaagcgccgaacctgaggaagatagccgacaaagttgcctcgtctggatactttgttgtggtgccagatttcttacatggggatcctttagtacctgaaagtactgagaaaccgtttcaaatgtggataaaagaacatggcccggacaaagcatttgaagaggcgaaaccaattattgccgctctgaaggagaaaggagtgtctagtattggggctgtaggttattgctggggtgcaaaggtggtggtagagttagtgaaagctcatgagatccaggctgctgtgatgtgtcacccctcttttgtgactgttgatgatatgaaagaggtcaaatgcccaattgctatacttggagctgaaattgatcgtatgtccccaccagaagtggtgaagcagttcgagcaggttctttcttcaaagtcagggattggccactttgtcaagatcttccctggggttgaacatggatggactgtgagatacaagaatgatgatgcagctgctgtcaagagcgccgaggaagccctggcggacatgattgactggtttaataagaacctgaag

SEQ ID NO: 504 - protein, 240 aa, Oryza sativa
MASPQCCANPPTLNPAGGEGKVVESFGGIKAYVAGAAESKAAVVLISDVFGFEAPNLRKIADKVASSGYFVVVPDFLHGDPLVPESTEKPFQMWIKEHGPDKAFEEAKPIIAALKEKGVSSIGAVGYCWGAKVVVELVKAHEIQAAVMCHPSFVTVDDMKEVKCPIAILGAEIDRMSPPEVVKQFEQVLSSKSGIGHFVKIFPGVEHGWTVRYKNDDAAAVKSAEEALADMIDWFNKNLK

SEQ ID NO: 505 - DNA, 1131 bp, Oryza sativa
atggccgccgcagccacgacatcctcccacctgctcctgctctcccgccagcaggcggcggcctcgctccaatgcggcctctccttccggaggcagcccggcaggctcgccggtgggtcgtcggccccgagcgtgcggtgcatggcggccgtcgacacggcctcggcgcccgccgcgacggaggctagcaagaagagcagctacgagatcaccacgctgacgacgtggctgctgaagcaggagcaggccgggaccatcgacggcgagatgaccatcgtgctggccagcatctccacggcgtgcaagcagatcgcctcgctggtgcagcgcgcgcccatctccaacctcaccggcgtccagggcgccgtcaacgtgcagggcgaggaccagaaaaaactcgacgtcgtctccaacgaggtgttctccaactgcctcaaatcgagcgggcgcaccggcgtgatcgcgtcggaggaggaggacgtgccggtggccgtggaggagagctactcgggcaactacatcgtggtgttcgacccgctcgacggctcctccaacatcgacgccgccgtctccaccggctccatcttcggcatctacagccccaacgacgagtgcctagccgacatcgccgacgaccaaaatcttgaccaggtggaccaaaggtgcatcgtgagcgtgtgccagccggggagcaacctgcgtcgccgccggctactgcatgtactcgagctcggtcatcttcgtgctccccatcgggacaggggtgtacgtgttcacgctggacccgatgtacggcgagttcgtgctgacgcaggagaaggtgcagatccccaaggcaggcaagatctatgccttcaacgagggcaactacgcgctctgggacgacaagctcaagagctacatggacagcctcaaggagcccgggccgtccgggaagccatactccgcgcgctacatcggcagcctcgtcggcgacttccaccgcacgctgctctacggcggcatctacggctaccccagggaccagaagagcaagaacggcaagctgcggctgctgtacgagtgcgcgccgatgagcttcatcgtcgagcaggccggcggcaagggctccgatggccaccagaggatact

SEQ ID NO: 506 - protein, 377 aa, Oryza sativa
MAAAATTSSHLLLLSRQQAAASLQCGLSFRRQPGRLAGGSSAPSVRCMAAVDTASAPAATEASKKSSYEITTLTTWLLKQEQAGTIDGEMTIVLASISTACKQIASLVQRAPISNLTGVQGAVNVQGEDQKKLDVVSNEVFSNCLKSSGRTGVIASEEEDVPVAVEESYSGNYIVVFDPLDGSSNIDAAVSTGSIFGIYSPNDECLADIADDQNLDQVDQRCIVSVCQPGSNLRRRRLLHVLELGHLRAPHRDRGVRVHAGPDVRRVRADAGEGADPQGRQDLCLQRGQLRALGRQAQELHGQPQGARAVREAILRALHRQPRRRLPPHAALRRHLRLPQGPEEQERQAAAAVRVRADELHRRAGRRQGLRWPPEDT

SEQ ID NO: 507 - DNA, 1293 bp, Oryza sativa
atggcgtctgctactctcctcaagtcatctttccttcccaagaagtctgaatggggtgccacccgccaggctgccgcccccaagccggtgactgtctccatggttgtccgcgctggtgcctacgacgatgagcttgtcaagaccgcgaaaaccattgcatcaccaggaaggggtatccttgccatggatgagtcgaacgcgacctgcggtaagaggcttgcgtcaattggccttgagaacaccgaggccaaccgccaggcttaccggaccctccttgtcaccgcaccgggcttgggacagtacatctccggtgctatcctcttcgaggagactctgtaccagtcaactgtagatggcaagaagattgtcgacatcctcactgagcagaaaatcgttccaggtatcaaggtcgacaagggtcttgtgccccttgctggctccaacaacgagtcatggtgccaaggtctcgacggccttgcctcgcgcgaggcggcatactaccagcagggcgctcgcttcgccaagtggcgcactgttgtcagcatccccaacggcccatctgaactcgccgtgaaaggaggctgcctggggcccttgcccgctacgccgccatttctcaggacacggggctggtgcccgattgtcgagcctgagatcctcctcgacggtgagcatggcatcgacaggaccttcgaggtggcgcaaaaggggtgggccggaaaccttcttctacatggcccaaaaccatgtgatggttcgagggcatcctccctcaagccaagcatggtgacacccggtgccgagtgcaaggacagggccacccctgagcaagtatatgaatacaccctcaagctcctccacagaaggatcccccctgccgtcccccggcatcatgttcttgtcgggtgggcagtcggaggtggaggcgacgcagaacctgaacgcgatgaaccaggggcccaacccgtggcacgtgtcgttttcgtacgcgagggcgctgcagaacacgtgcctcaagacgtggggcgggcagccggagaacgtgaaggcggcgcaggacgcgctgctcctccgcgccaaggccaactcgctggcgcagctcggcaagtacaccagcgacggcgaggccgccgaggccaaggagggcatgttcgtcaagaactacgtctactaatccgatccaatccaatcaagacagtgaacctgctgctgctgctgctacgtactacagctactgctatactgctagtacctcgagggcactgtagccagtgtgtcgtcacagttacaggt

SEQ ID NO: 508 - protein, 431 aa, Oryza sativa
MASATLLKSSFLPKKSEWGATRQAAAPKPVTVSMVVRAGAYDDELVKTAKTIASPGRGILAMDESNATCGKRLASIGLENTEANRQAYRTLLVTAPGLGQYISGAILFEETLYQSTVDGKKIVDILTEQKIVPGIKVDKGLVPLAGSNNESWCQGLDGLASREAAYYQQGARFAKWRTVVSIPNGPSELAVKGGCLGPLPATPPFLRTRGWCPIVEPEILLDGEHGIDRTFEVAQKGWAGNLLLHGPKPCDGSRASSLKPSMVTPGAECKDRATPEQVYEYTLKLLHRRIPPAVPRHHVLVGWAVGGGGDAEPERDEPGAQPVARVVFVREGAAEHVPQDVGRAAGEREGGAGRAAPPRQGQLAGAARQVHQRRRGRRGQGGHVRQELRLLIRSNPIKTVNLLLLLLRTTATAILLVPRGHCSQCVVTVTG

SEQ ID NO: 509 - DNA, 1311 bp, Oryza sativa
atgggcaagcaccatgtcaccctgtgttgtgtcgtttttgctgtgctctgcctggcgtccagcttagcacaagcccaagttctcttccaggggtttaactgggagtcgtggaggaagcaaggcgggtggtacaactttctgcacgagaaggtggaggagatcgccagcacgggcgccacccacgtctggctcccgccgccgtcgcactctgtctcgccgcagggttacatgccggggcggctctacgacctggacgcgtccaagtacggcacggaggcggagctcaagtcgctgatcgaggcattccacgacaagaacgtcgagtgcctcgccgacatcgtcatcaaccaccgctgcgccgactacaaggacagccgcggcgtgtactgcgtgttcgagggcggcacgcccgacggccgcctcgactggggccccgacatgatctgcagcgacgacacgcagtactccaacggccgcggccaccgcgacaccggcgccgggttcggcgccgcgcccgacatcgaccacctcaacccgcgtgtccagcgggagctcaccgactggctcaactggctcaggaccgacctcggcttcgacggctggcgcctcgacttcgccaagggctactccgcgccgctggcgaggatctacgtcgacaacaccaacccgacgttcgtcgtcggcgagatctggagctcgctcatctacaacggcgacggcaagccgtcgaccaaccaggacgcggacaggcaggagctggtgaactgggtggagggcgtcggcaagccggcgacggcgttcgacttcaccaccaagggcatcctccaggccgccgtgcagggcgagctgtggaggctccacgacggcaacggcaaggcgcccggcctcatggggtggatgcccgatcaggccgtaaccttcgtcgacaaccacgacaccggctcgacccagtcgctctggccgttcccttccgacaaggtcatgcagggctacgcctacatcctcactcaccctggcatcccatgcatcttctacgaccatgtgttcgactggaacctgcagcacgagatcgcgacgctggctgaaatccggtcaaggaacgggatccatgcggagagcacgctggacatcctcaaggccgagggggacatctacgtcgccatgatcgacggcaaggtgatcaccaagctcgggccgaggtacgacgccggcgggatcatcccctccgacttccatgtcgtggcgcacggcaacgactactgcgtctgggagaaggaaggcctcagggttcctgccggtagaaagcactat

SEQ ID NO: 510 - protein, 437 aa, Oryza sativa
MGKHHVTLCCVVFAVLCLASSLAQAQVLFQGFNWESWRKQGGWYNFLHEKVEEIASTGATHVWLPPPSHSVSPQGYMPGRLYDLDASKYGTEAELKSLIEAFHDKNVECLADIVINHRCADYKDSRGVYCVFEGGTPDGRLDWGPDMICSDDTQYSNGRGHRDTGAGFGAAPDIDHLNPRVQRELTDWLNWLRTDLGFDGWRLDFAKGYSAPLARIYVDNTNPTFVVGEIWSSLIYNGDGKPSTNQDADRQELVNWVEGVGKPATAFDFTTKGILQAAVQGELWRLHDGNGKAPGLMGWMPDQAVTFVDNHDTGSTQSLWPFPSDKVMQGYAYILTHPGIPCIFYDHVFDWNLQHEIATLAEIRSRNGIHAESTLDILKAEGDIYVAMIDGKVITKLGPRYDAGGIIPSDFHVVAHGNDYCVWEKEGLRVPAGRKHY

SEQ ID NO: 511 - DNA, 642 bp, Oryza sativa
  misc_feature (505)..(505): n = any nucleotide
atggcagccaatgttggggaatctacaagcagcggcaccaatggcgatgcagctggggggagctttgaatgcaatatctgctttgaattgccacaagaaccaatagttactctctgtggccacctcttctgctggccatgtatttacaggtggttgcacatccacgcacactctccagagtgcccggtgtgcaaagctgtcgttgaagaggataagctcgttcccctttatgggcgtggcaaggaccgcgtcgatccaaggtcaaagaacatacccgaggctgacattcctaaccgcccaactggccagaggcctgccacagctccacaggccgatcctaacaacaattttgcccatgccaatcctaatgctaatgccaatccatggttcatgggcactggagtaccattggctaatgcacggtgggggaattatgcattctcagctgcgtttggaggcctattccctatgcttagcttccaagtgcatggatttccagatgcanatccttatgccacagcctgctgggtttcactatgggtatggccatggtcatggattccatggcggacatatgggtcatgccgccccacgtgtccctcgacagggacactggagcaccgcagcaggcagacatctacc

SEQ ID NO: 512 - protein, 214 aa, Oryza sativa
  misc_feature (169)..(169): Xaa = any naturally occuring amino acid
MAANVGESTSSGTNGDAAGGSFECNICFELPQEPIVTLCGHLFCWPCIYRWLHIHAHSPECPVCKAVVEEDKLVPLYGRGKDRVDPRSKNIPEADIPNRPTGQRPATAPQADPNNNFAHANPNANANPWFMGTGVPLANARWGNYAFSAAFGGLFPMLSFQVHGFPDAXPYATACWVSLWVWPWSWIPWRTYGSCRPTCPSTGTLEHRSRQTST

SEQ ID NO: 513 - DNA, 2451 bp, Oryza sativa; identical to SEQ ID NO: 121

SEQ ID NO: 514 - protein, 816 aa, Oryza sativa; identical to SEQ ID NO: 122

SEQ ID NO: 515 - DNA, 1131 bp, Oryza sativa
atggctgacgaggatattcaacctattgtgtgcgacaatggcactggaatggtcaaggcaggttttgctggtgatgatgcaccaagggccgtcttccctagcattgtagggagaccacgtcacaccggtgtcatggttgggatgggccaaaaggatgcctatgtgggtgatgaagctcaggcaaaaaggggtatcctgactctaaagtacccaattgaacatggaattgtcaataactgggatgacatggagaaaatatggcaccacaccttctacaatgagcttcgtgttgcacctgaagatcaccctgtattactaactgaagcccctctcaatcccaaagccaacagagagaagatgacacagatcatgtttgagaccttcaattgcccagcaatgtatgtcgcaatccaggctgttctatccttgtatgctagcggtcgaacaactggtatcgtgcttgactctggtgatggtgtgagccacactgttccaatatatgaaggatatacgcttcctcatgctatcctccggttggatcttgctggccgagacctcactgaccatctcatgaagattctcacagagagagggtattccctcacaacaagcgctgagcgggaaattgtcagagacataaaggagaagctcgcttatgtcgcccttgattatgagcaggagctggaaacttctaggagcagctcctctgttgagaaaagctatgagatgcctgatggccaagtaattaccattgggtcagaaaggttcaggtgccctgaggttctgttccagccatctcttgttggtatggaatctcctggcatacatgaagctacatacaactccatcatgaagtgtgatgtagatataaggaaggacctgtatggcaatgttgtcctaagtggagggtctaccatgtttcctggaattgctgatcgtatgagcaaggagatcacttcccttgctcctagcagtatgaaggttaaagtgattgcaccaccagaaagaaaatacagcgtctggattggtggttctattttggcttctcttagcactttccagcagatgtggatctccaagggcgagtatgatgaatctggtcctggcattgtccatatgaagtgcttctga

SEQ ID NO: 516 - protein, 376 aa, Oryza sativa
MADEDIQPIVCDNGTGMVKAGFAGDDAPRAVFPSIVGRPRHTGVMVGMGQKDAYVGDEAQAKRGILTLKYPIEHGIVNNWDDMEKIWHHTFYNELRVAPEDHPVLLTEAPLNPKANREKMTQIMFETFNCPAMYVAIQAVLSLYASGRTTGIVLDSGDGVSHTVPIYEGYTLPHAILRLDLAGRDLTDHLMKILTERGYSLTTSAEREIVRDIKEKLAYVALDYEQELETSRSSSSVEKSYEMPDGQVITIGSERFRCPEVLFQPSLVGMESPGIHEATYNSIMKCDVDIRKDLYGNVVLSGGSTMFPGIADRMSKEITSLAPSSMKVKVIAPPERKYSVWIGGSILASLSTFQQMWISKGEYDESGPGIVHMKCF

SEQ ID NO: 517 - DNA, 2028 bp, Oryza sativa
  misc_feature (696)..(696): n = any nucleotide
atgcagctggggcttctcctcgccgcgcttctcctcttcacgtcgtcgctggccggctctgtggcggctgccgcaccgccgccgccggcgggggccaagggtggtggtgccaagagcggcggcggcggcggcaccgtgatcgggatcgacctcggcacgacgtactcgtgcgtcggcgtctaccggaacgaccgtgtcgagatcatcgccaacgaccaggggaaccggatcacgccctcgtgggtcgccttcaccgacggcggcgagcggctcatcggcgaggcagccaagaaccaggcggcggccaacccggagcggaccatctacgacgccaagcggctcatcggccggcagttctccgacgccgaggtgcagcgcgacatgaagctgctgccgttcgccgtcgtcgaccggaacggcaagccgcacgtgcgcgtcgaggtgaaggacggcgacgtgcgcgtgttcagcccggaggaggtgagcgccatggtgctcacccggatgaaggagacggccgaggcctacctcggcgagaaggtcacgcgcgccgtcgtcaccgtcccggcctacttcaacgacgcgcagcggcaggccaccaaggacgccggcgtcatcgccgggctcaccgtcgaccgcatcatcaacgagccgaccgccgccgccatcgcctacggcatcgacaagaagggcgcngagaagaacgtcctcgtcttcgacctcggcggcggcacgttcgacgtcagcatcctcgccatcgacaacggcgtgttcgaggtccttgccaccaacggcgacacccacctcggcggcgaggacttcgaccaacgcctcatggaccacttcgtcaaggtcatccgccggaagcacgggcgcgacatcgccggcgacgcgcgcgcgctgggcaagctccgccgcgagtgcgagcgcgccaagcgcgcgctcagcaaccagcaccaggtgcgcgtcgagatcgagtccctgttcgacggcgtcgacttctcggagccgctctcccgggcgcggttcgaggagctcaacggcgacctcttcaagaagacgatggtgccggtgaggaaggccatggcggacgccgggctgggcaagggcgacatcgacgagatcgtcctcgtcggcggcagcaccaggatccccaaggtgcagcagctgctcaaggactacttcggtggcaaggagcccaaccgcggcgtcaaccccgacgaggccgtggcgtacggcgccgccgtgcaggccagcatcatcagcggccacgtcgacgagaacacggagagcatgatcctcctcgacgtcgcgccgctcaccctcggcctggagacggccggcggcgtgatgaccaagctgatcccgcgcaacacggtggtgccgacgaagaagacgcaggtgttcaccacgtacaaggacaggcagacgacggtgaccatccaggtgttcgagggcgagcggagcatgacgagggacaaccggctgctcggcaagttcgacctcaccggcatcgcgccggcgccgaggggggcgccgcagatcgcggtgacgttcgaggtggacgccaacggcatcctcagcgtgctggccgccgacaaggccaccggcaggtcggagaagatcaccatctccggcgacgaccgcaagatcagccaggaggagatcgaccggatggtgcgcgaggcggaggagttcgccgacgaggaccgccggcacagggagcaggtggacgcccggaacagcctggaggcgtacgtctacaacgtcaagagcacgctcggcggcaagatggcggacgccatggagggggaggagaaggagaaggtggaggaggcggtgagggaggcgcacgagtggctggacggcaacccggacgccggcaaggaggagtacgaggagaagctgcgggagctggaggacgtgtgcaaccccgtcatgtcggcggtgtaccagaggtccggcggcggcggcggcgcaccggaagatggcaacgtcgacgacgaggatgaccacgatgagctttag

SEQ ID NO: 518 - protein, 675 aa, Oryza sativa
MQLGLLLAALLLFTSSLAGSVAAAAPPPPAGAKGGGAKSGGGGGTVIGIDLGTTYSCVGVYRNDRVEIIANDQGNRITPSWVAFTDGGERLIGEAAKNQAAANPERTIYDAKRLIGRQFSDAEVQRDMKLLPFAVVDRNGKPHVRVEVKDGDVRVFSPEEVSAMVLTRMKETAEAYLGEKVTRAVVTVPAYFNDAQRQATKDAGVIAGLTVDRIINEPTAAAIAYGIDKKGAEKNVLVFDLGGGTFDVSILAIDNGVFEVLATNGDTHLGGEDFDQRLMDHFVKVIRRKHGRDIAGDARALGKLRRECERAKRALSNQHQVRVEIESLFDGVDFSEPLSRARFEELNGDLFKKTMVPVRKAMADAGLGKGDIDEIVLVGGSTRIPKVQQLLKDYFGGKEPNRGVNPDEAVAYGAAVQASIISGHVDENTESMILLDVAPLTLGLETAGGVMTKLIPRNTVVPTKKTQVFTTYKDRQTTVTIQVFEGERSMTRDNRLLGKFDLTGIAPAPRGAPQIAVTFEVDANGILSVLAADKATGRSEKITISGDDRKISQEEIDRMVREAEEFADEDRRHREQVDARNSLEAYVYNVKSTLGGKMADAMEGEEKEKVEEAVREAHEWLDGNPDAGKEEYEEKLRELEDVCNPVMSAVYQRSGGGGGAPEDGNVDDEDDHDEL

SEQ ID NO: 519 - DNA, 2526 bp, Oryza sativa
  misc_feature (39)..(39): n = any nucleotide
  misc_feature (124)..(124): n = any nucleotide
  misc_feature (126)..(126): n = any nucleotide
  misc_feature (1709)..(1709): n = any nucleotide
atgccggagagcaacggcgccgcgtgcggcgcggcgganaaggtgaagccggcggccagccccgcgtcggaggagccggccgccatcgccggtaacatctccttccacgcgcagtacagccccnanttctcgccgctcgcgttcggccccgagcaggccttctactccaccgccgagagcgtccgcgatcacctcgtccagagatggaacgagacgtacttgcatttccacaagacggatccgaagcagacgtactacctctccatggagtacctgcagggccgcgcgctcaccaacgccgtcggcaacctcggcatcaccggcgcctacgcggaggccgtgaagaagttcgggtacgagctcgaggccctcgtcgggcaggaaaaagatgcagctctgggaaatggtggcttgggtaggctcgcatcttgctttttggattcgatggcaacactaaatttgcctgcttggggatatggtctgcggtaccgatatggtctattcaaacaatgcatcaccaaggaaggccaggaagaaattgctgaagattggcttgagaagttcagcccatgggaaattgtcaggcatgacattgtatacccaatcagattttttggccacgttgagattttgccagatggatctcgtaaatgggtggggggagaagttctcaatgctttagcatatgatgtgccaattcctgggtacaagacaaaaaatgcaatcagtcttcgtctttgggacgcaaaagctagtgcggaggattttaacttatttcaattcaatgatggccagtatgagtccgctgctcaacttcatgctagggcacaacagatatgtgccgttctctatcccggtgatgctacagaagaaggaaagcttctcagactgaagcaacagtatttcctttgcagtgcatcgcttcaggatatttttttcaggtttaaagaaaggaaagctgacagagtttctgggaaatggagtgagttccctgcaaaagttgctgttcaattgaatgacactcacccaactcttgcgattcctgagctgatgaggctactcatggatgtggagggacttggttgggatgaagcatgggatatcacaaataaaacaattgcctacaccaatcacactgttcttcctgaagcccttgagaaatggtcgcagattgtaatgaggaaattacttccacgacacatggaaattatcgaggaaattgacaagcggttcaaggaaatggtaatctccacccggaaggaaatggagggaaagattgactccatgagaatcttagacaactcaaatcctcagaagccagtagtgcgcatggcaaatttgtgcgtagtgtctgcccatacggtgaatggagtggctgagttacacagcaacattttgaaggaagagctttttgcagactatctctctatatggcccaacaaatttcagaacaaaacaaatggaattacacctcgtagatggctccgtttctgcaacccagagttgagtgaaatagtaacaaaatggctaaaaacagatcagtggacaagcaaccttgatcttcttaccggacttcggaaatttgcagatgatgaaaagcttcatgctgagtgggcatcagctaagttggctagcaaaaaacgcctagccaagcatgtgttggatgtgacaggtgttacaatcgacccaaatagcctttttgatatacnaattaaacgcattcatgagtacaagagacagctgctaaacattttgggagctgtttacagatacaagaagttaaagggaatgagtgcagaggagagacaaaaagttacgccacgcactgtcatgatagggggaaaagcattcgcgacttacaccaatgccaaaagaatagtaaaattggtaaatgatgttggtgctgtggtgaacaatgatcctgatgttaataaatacctaaaggtggtgttcattcccaactacaatgtatctgtggccgaggtgctcattcctgggagtgaactgtcacagcacatcagtaccgcaggcatggaagcaagtggaacgagtaatatgaaattctctctgaatggttgtgttatcattggtactcttgatggagctaatgttgagataagagaggaagtgggacaagaaaatttcttcctttttggtgccaaggcagatcaagttgctgggctgaggaaggatagagagaatggcttgttcaaaccagacccacgttttgaagaagccaagcagcttataaggagtggtgcttttggcacctatgactatgctcccctcttggattctcttgaaggaaattctggatttggtcgtggtgattatttcctcgttggctatgatttcccaagctatattgatgcacaggcccaggttgatgaagcctacaaggataagaaaaaatggatcaagatgtctatactgaacacagctggaagtggcaaattcagcagcgaccgtactatcgctcagtatgcaaaggaaatatggggcattactgctagccctgtctcctaa

SEQ ID NO: 520 - protein, 841 aa, Oryza sativa
MPESNGAACGAADKVKPAASPASEEPAAIAGNISFHAQYSPNFSPLAFGPEQAFYSTAESVRDHLVQRWNETYLHFHKTDPKQTYYLSMEYLQGRALTNAVGNLGITGAYAEAVKKFGYELEALVGQEKDAALGNGGLGRLASCFLDSMATLNLPAWGYGLRYRYGLFKQCITKEGQEEIAEDWLEKFSPWEIVRHDIVYPIRFFGHVEILPDGSRKWVGGEVLNALAYDVPIPGYKTKNAISLRLWDAKASAEDFNLFQFNDGQYESAAQLHARAQQICAVLYPGDATEEGKLLRLKQQYFLCSASLQDIFFRFKERKADRVSGKWSEFPAKVAVQLNDTHPTLAIPELMRLLMDVEGLGWDEAWDITNKTIAYTNHTVLPEALEKWSQIVMRKLLPRHMEIIEEIDKRFKEMVISTRKEMEGKIDSMRILDNSNPQKPVVRMANLCVVSAHTVNGVAELHSNILKEELFADYLSIWPNKFQNKTNGITPRRWLRFCNPELSEIVTKWLKTDQWTSNLDLLTGLRKFADDEKLHAEWASAKLASKKRLAKHVLDVTGVTIDPNSLFDIQIKRIHEYKRQLLNILGAVYRYKKLKGMSAEERQKVTPRTVMIGGKAFATYTNAKRIVKLVNDVGAVVNNDPDVNKYLKVVFIPNYNVSVAEVLIPGSELSQHISTAGMEASGTSNMKFSLNGCVIIGTLDGANVEIREEVGQENFFLFGAKADQVAGLRKDRENGLFKPDPRFEEAKQLIRSGAFGTYDYAPLLDSLEGNSGFGRGDYFLVGYDFPSYIDAQAQVDEAYKDKKKWIKMSILNTAGSGKFSSDRTIAQYAKEIWGITASPVS

SEQ ID NO: 521 - DNA, 1968 bp, Oryza sativa
atggcggcggaggagggggcgaggtcgccgacgaggatgctggcggaggggcacctgcgggtggccaccggcgggggcgcgccggccgacggcgggatcgccgtccgccacctcccacaccaccacgcatctaagagaggtgactgggctcgatccctgtgtgcgcgcctgtgcatgtcttatccattttctgtaccactgaattatgtcatggttcctgctacattagatgactataaaaggcttttagttcctgtaattgaggagtactttagtacaggagatgtggaactggcagcttctgagttaaggagtcttggatctgatcagttccacagttactttatcaagaagctcatatccatggcaatggatcgtcatgacaaagaaaaagaaatggcgtcaattctgttgtctgcgttgtatgcggatctactaggctcttccaagatgagtgaaggttttatgatgcttcttgagtcaacagaagatctatctgtcgacataccggatgctattgatgtcttgtctgtttttgttgctcgtgctgttgtggatgaaatactgcctcctgttttcctcactcgagccagagcactgcttcctgaattttctaaaggtattgaagttctgcaagtttctgagaaaagctacttgtcagccccccatcatgctgagctagttgagcgcaagtggggtgggagcactcactttactgtggaagaggcgaaaaggagaatccaggatattctgaaggagtatattgagagtggagatattgatgaagcttttaggtgtataagggagctgggccttccatttttccatcatgaggttgttaaacgcgctctcaccttgagcatggagaatctgtcatcacagccattaatcctgaagctgttgaaggaatcaactgcaggttgcctgatcagttctaatcaaatgtctaagggtttttgtcggctagcagagagtattgatgatctgagccttgatattccttctgccaagattctctttgacaagctggttctgactgctacatctgaaggatggcttgatgcttcattcactacatcttctgcccctaatgaagatatgcgaaatgcaagtggtgaaaagatcaagcatttcaaagaagaatctggacacataatccaagagtattttctctcagatgatgtcccagaactcattataagccttcaagagctttctgccccagagtacaatcctatcttcctcaagaagcttatcaccctcgctatggacagaaagaatagggagaaggagatggcttctgccctgctttcttcactcagcttggaacttttctccactgatgacatcatgaagggattcatattgctcctgcagtcagcagaagacactgccctcgacattgtggatgctcccagtgaacttgccctcttccttgccagggcagttattgatgaagttctgattccactgaatttggatgagatcggtaacaggcttcgccctaacagcagtggtagtcaaactgtccagatggctcgtgcccttcttgctgctcgccactctggtgagaggatactgcgttgctggggtggcggcactggctgggctgtagaagatgcgaaggacaagatcgcaaagctccttgaagaatacaatactggcggtgacttgggggaggcttgccaatgcatccgtgaccttggaatgcccttcttcaaccatgaagtggtgaagaaagcgcttgttatggcaatggagaaggagaatgaagcaaggatcttggctctgctacaggagtgcttcggtgaggggctgataacaatcaaccagatgacattaggcttcactcgcgtcaaggaaggcctcgatgatctgatcctcgacatcccaaatgcacaggagaagtttggagcatatgtggatctcgcaactgaacgtggatggctgcttccacccttcgcctag

SEQ ID NO: 522 - protein, 655 aa, Oryza sativa
MAAEEGARSPTRMLAEGHLRVATGGGAPADGGIAVRHLPHHHASKRGDWARSLCARLCMSYPFSVPLNYVMVPATLDDYKRLLVPVIEEYFSTGDVELAASELRSLGSDQFHSYFIKKLISMAMDRHDKEKEMASILLSALYADLLGSSKMSEGFMMLLESTEDLSVDIPDAIDVLSVFVARAVVDEILPPVFLTRARALLPEFSKGIEVLQVSEKSYLSAPHHAELVERKWGGSTHFTVEEAKRRIQDILKEYIESGDIDEAFRCIRELGLPFFHHEVVKRALTLSMENLSSQPLILKLLKESTAGCLISSNQMSKGFCRLAESIDDLSLDIPSAKILFDKLVLTATSEGWLDASFTTSSAPNEDMRNASGEKIKHFKEESGHIIQEYFLSDDVPELIISLQELSAPEYNPIFLKKLITLAMDRKNREKEMASALLSSLSLELFSTDDIMKGFILLLQSAEDTALDIVDAPSELALFLARAVIDEVLIPLNLDEIGNRLRPNSSGSQTVQMARALLAARHSGERILRCWGGGTGWAVEDAKDKIAKLLEEYNTGGDLGEACQCIRDLGMPFFNHEVVKKALVMAMEKENEARILALLQECFGEGLITINQMTLGFTRVKEGLDDLILDIPNAQEKFGAYVDLATERGWLLPPFA

SEQ ID NO: 523 - DNA, 2304 bp, Oryza sativa
atggcgtcgttcgcggtgtccggcgcgaggctcggggtcgtgcgggcggggggcggcggcggcggcgggggtggccccggcggcgcgatccggcggggtggacttgccgtcggtgctcttcaggaggaaggactccttctcactagagtcggctttgcatttgcaggtggcgttgtgagctgcgcgggtgctcctgggaaggtgctggtgcctggcggtgggagcgacgacttgctgtcctctgcggaaccagacgtggaaactcaagagcaacctgaagaatctcagatacctgatgataataaagtaaaaccttttgaggaggagggaagagattccagcagtggcagaagcaagcataaagaagtgattcaagacattgaggaaaatgtgactgagggtgtgatcaaagatgctgatgaaccaactgtggaggataaaccacgagttatcccaccaccaggagatgggcagaagatataccaaattgacccaatgctggaaggatttcggaaccatcttgactaccgcgctgaaggcattacctaccgagaaatgggcacctggagcacagtcatcacattaagaattaaaaatgacattttcatcctattgcagtctgcagcattagtaggtgacttcaacaattggaacccaaatgcagatactatgaccagaaatgagtatggtgtttgggagatttccctgcctaacaatgctgatggatcccctgctattcctcatggctcacgtgtaaagattcggatggatacaccatctggcgtaaaggattcaattcctgcctggattaagtttgctgtgcaggctccaggtgaaataccgtacaacggtatatattatgatccacctgaagaagaaccgaagataaacacatatgctaattttagggatgaggtgctaccaagaattaaaaagcttgggtacaatgctgtacagataatggcaatccaggagcactcttattacgcaagctttgggtatcatgttactaacttctttgcgccaagtagccgtttcggaaccccagaagacttgaaatctctgattgataaagctcacgagcttggtttgcttgtacttatggatattgttcacagtcatgcatcaaacaataccctggatggtttgaatggttttgatggtactgatacacattacttccatggtggaccacggggtcatcactggatgtgggattctcgcctgttcaactatgggagttgggaagttttaagatatttactgtcgaatgcaaggtggtggcttgaagaatacaagtttgatgggtttcgatttgatggggtgacctccatgatgtatactcatcatggtttacaggtggcatttactggcaactatggcgaatattttggatttgctactgatgttgatgcagtagtttacttgatgctggtgaacgatctaattcatgggctttatcctgaggctgtagccattggtgaagatgtcagcgggatgcccacattttgtattcctgttcaagatggtggtgttggttttgactatcgtttgcatatggctgtaccggacaaatggatcgaactcctcaagcaaagtgacgaatattggaaaatgggtgatatcgtgcacaccctaacgaatagaaggtggtcagagaagtgtgttacttatgcagaaagtcatgaccaagcactagttggtgacaagactattgcattctggttgatggataaggatatgtatgattttatggctctagacagaccttcaacacctcgcattgatcgtgggatagcattacataaaatgattaggcttgtcaccatgggcttaggaggcgaaggctatcttaatttcatgggaaatgagtttgggcatcctgaatggatagatttcccaagaggcccgcaaagtcttccaaatggctcggtcctcccaggaaacaactacagttttgataaatgccgtcgtagatttgaccttttcatgacatctgagcaccagtatatatcgcgcaaacacgaggaggataaggtgatcatcttcgagagaggagatttggtattcgtgttcaacttccactggagtaatagctattttgactatcgcgtcggttgtttaaagcctggaaagtacaagattgtgttggactcagacgatggcctctttggtggattcagtcggcttgatcatgatgctgagtacttcactgctgactggccgcatgacaacagaccatgttcattctcggtgtacaccccaagcagaaccgccgtcgtgtatgcacttacagaggactaa

SEQ ID NO: 524 - protein, 767 aa, Oryza sativa
MASFAVSGARLGVVRAGGGGGGGGGPGGAIRRGGLAVGALQEEGLLLTRVGFAFAGGVVSCAGAPGKVLVPGGGSDDLLSSAEPDVETQEQPEESQIPDDNKVKPFEEEGRDSSSGRSKHKEVIQDIEENVTEGVIKDADEPTVEDKPRVIPPPGDGQKIYQIDPMLEGFRNHLDYRAEGITYREMGTWSTVITLRIKNDIFILLQSAALVGDFNNWNPNADTMTRNEYGVWEISLPNNADGSPAIPHGSRVKIRMDTPSGVKDSIPAWIKFAVQAPGEIPYNGIYYDPPEEEPKINTYANFRDEVLPRIKKLGYNAVQIMAIQEHSYYASFGYHVTNFFAPSSRFGTPEDLKSLIDKAHELGLLVLMDIVHSHASNNTLDGLNGFDGTDTHYFHGGPRGHHWMWDSRLFNYGSWEVLRYLLSNARWWLEEYKFDGFRFDGVTSMMYTHHGLQVAFTGNYGEYFGFATDVDAVVYLMLVNDLIHGLYPEAVAIGEDVSGMPTFCIPVQDGGVGFDYRLHMAVPDKWIELLKQSDEYWKMGDIVHTLTNRRWSEKCVTYAESHDQALVGDKTIAFWLMDKDMYDFMALDRPSTPRIDRGIALHKMIRLVTMGLGGEGYLNFMGNEFGHPEWIDFPRGPQSLPNGSVLPGNNYSFDKCRRRFDLFMTSEHQYISRKHEEDKVIIFERGDLVFVFNFHWSNSYFDYRVGCLKPGKYKIVLDSDDGLFGGFSRLDHDAEYFTADWPHDNRPCSFSVYTPSRTAVVYALTED

SEQ ID NO: 525 - DNA, 2031 bp, Oryza sativa
atggcgtccctcccacgcgccgctccacgccgctcggctcctggcccccgcggccgcggcggcggaagagttgtaagcgcggccccgttcgcgcgggtctcgcctgcgccgcgcggtcgtgctaccgcttccggaccgacgacgacggcgtggtggacgtggccgtctccggggaggatggggacggcggcggcgggggggcgtcccgctggcgccggccgccggcggcgcctccctcgcggccgagctctccttcgacccgacccgcgcgccgttctacctctcgttcctgctcacggacgcgtcgggggcggagatacggacgcaccgcaagacgagcttccgcgtgcccccgccgccgtcggcggcggcggcggcgacgagcccgcgctggagatcgacctcgatccgtacatccaccggactggcaacgtctggcatgtctctctggcgagcgtagatgggtacgtcagctatgccttctgctgcggtggcatccgccgcccactgttggacccgtacgccaaggtgatcggagacttcgtctccagcaactcggtttacgacgagggtgtcactgcgccgtcaatgaggtgctttgcatcgttggcgattgcgccgagctacaactggggaagggacaggcacccccgtctgccattggagaagctggtggtgtaccgggcaaatgtggctttgttcacaaaggacaggtcgagcgggctcccggatgacgctgccggcactttcaccgggctttctgctaaggtagagcacttcaggagccttggtgtcaatgcaattttgctggaaccagtgttcccatttcatcaggtgaaaggaccttatttcccgtaccatttcttttcaccgatgaacttgtatagcagcaaaggtttgagtgtttcagccatcaagtccatgaaggatatggtcagggtaatgcatagaaatggaatagaggtcctcttggaggtggtttttacacatactgctgagggagaatcagagtgtcagacgatatcaatgcgtggcattgataattcctcgtattacattgccaatgggatcgcaggatgcaaagcgagcatactgaattgcaaccatccggtgactcagaagctgattttggacagcctccgccattgggtgcttgacttccatgttgatgggttttgcttcatcaatgcccctttccttgtgagaggtcctgatccttggtctccacttgacatatctaacgtgcaattcccattccctcattggaaaagatgggctgaggtgaacacaagattctctattgatgtgcgcaaatttttgaagagagaagcacttattagtgatcttgctacacgcctcaatgatgatcttctttctgagtcgagctggaattgtggtgaagaaggtccatcagagaacagtgctgtccttcagacaaggctaaggcagatacgcaacttcttatttattctatttgtatcacttggtgttcctgttctgaacatgggagatgaatgtgggcactctgctgctggttcagtatcatacaaggatagagggcctctgaactggagaggcatgaagacaacatttgttaaggaagtgaccggattcatttcatttctaactgcactcaggagtcggcgaggcgatatctttcagagaagggaattcctaaaacttgagaatatacattggtatgggagcgatctatgtgagccaggttgggatgatcctaccagcaactttctttgcatgcacataaatgcagaggtagatgaaatggcggcagattcggtcagaggcgacctgtacatctgtttcaatgcaaacgaggaatcagtgagtgctgccttgcctgctcttgcagaaggatccgtgtggttgcgcttggttgacacatcacttgcatttccaggtttctttgcaaccgaatctaatcccaaggtgcaacaagtgccaggattatcctcttatcatgtggaagcgcatacttgtgttctatttgaatcaaagagcgctcttgcctag

SEQ ID NO: 526 - protein, 676 aa, Oryza sativa
MASLPRAAPRRSAPGPRGRGGGRVVSAAPFARVSPAPRGRATASGPTTTAWWTWPSPGRMGTAAAGGRPAGAGRRRRLPRGRALLRPDPRAVLPLVPAHGRVGGGDTDAPQDELPRAPAAVGGGGGDEPALEIDLDPYIHRTGNVWHVSLASVDGYVSYAFCCGGIRRPLLDPYAKVIGDFVSSNSVYDEGVTAPSMRCFASLAIAPSYNWGRDRHPRLPLEKLVVYRANVALFTKDRSSGLPDDAAGTFTGLSAKVEHFRSLGVNAILLEPVFPFHQVKGPYFPYHFFSPMNLYSSKGLSVSAIKSMKDMVRVMHRNGIEVLLEVVFTHTAEGESECQTISMRGIDNSSYYIANGIAGCKASILNCNHPVTQKLILDSLRHWVLDFHVDGFCFINAPFLVRGPDPWSPLDISNVQFPFPHWKRWAEVNTRFSIDVRKFLKREALISDLATRLNDDLLSESSWNCGEEGPSENSAVLQTRLRQIRNFLFILFVSLGVPVLNMGDECGHSAAGSVSYKDRGPLNWRGMKTTFVKEVTGFISFLTALRSRRGDIFQRREFLKLENIHWYGSDLCEPGWDDPTSNFLCMHINAEVDEMAADSVRGDLYICFNANEESVSAALPALAEGSVWLRLVDTSLAFPGFFATESNPKVQQVPGLSSYHVEAHTCVLFESKSALA

SEQ ID NO: 527 - DNA, 1584 bp, Oryza sativa
  misc_feature (280)..(280): n = any nucleotide
atggcggcgtcgctgctcatcccgctctgcctctgcatcctcctcctgcgcggcgcctccgccgtgagcgaccagcaagaagccggccgtcgcgatagctgcgaccgcatcgaccgccgcatccgcgcgctggagccgacgcgccgcgtcgactccgaggccggccacaccgagctctacgacgaccgcgacggccagctcccctgcgccggcgtcgccgccgcgcgcatcaccatccagcgcaacggcctcctcctcccttcctattccaactcccccngcctcgcctacatcgtccacggccgtggcatcgtcggcgtcgtcatccccggctgccccgagacgtaccaggagacctcgtcgtcgtcgtcgcaggagcaggaggacgacgagcgccgccgccgtggccgccgtggtgatgaggagagacggcgatcgagcgagggagaggaggaggaggaagaggagaccagccgccgcagcttcgagcagtccatccgcgacgagcaccagaggatcaccaccgtccgccagggcgacgtcgtggccatccccgccggcgcgccgttctgggtccacaacgacggcgactccccgctcgtcgccatctccgttcacgacgtcagcaacaacgccaaccagctcgaccaaacctccaggcgtttccggctagccggcgggcaggcgaggagcgaggggaggcagaggtacggtgagggcgagtcgtcggagtcggagacggaacgcggcggcgaggagtcgtacaacatcctgagcggcttcgacaccgagctgctcgccgagtcgatgcgcgtcagcccggacatcgcgcgcaagctgcagggccgcagcgacaagcgcggcaacatcgtgcgcgtccgccgcggcggcctccgcatgctccgcccggcgacggagcgggtgaccgacgaggagatgatgaggggcgccaacgccgccgccgccgccgggaacgggatcgacgaggccgtctgcttgatgaagctccgcgagaacgtcgccgacccgatgaaggccgacctctacacccccaatggcggccgcatcaccgtcctcaacagccagaagctccccgtcctcaagctcatcaagatgagcgtcaaccgcggcgtcatgcgccgggtgaacgcgatcctggcgccgcactggaacatcaacgcgcacgcggcggtgtacgcgacgagcgggagcgcgaggctgcaggtggtgagcagcgaggggcggcgggtgttcgacggcgagctccggcgcgggcagatggtggtggtgccgcagagcttcgcggtggcggggcgcgccggcgacgaggggttcgcgtgggtgtcgttccagacgagcgacggcgccatgaacgcgccggtggttggcaagtcgtcggcgctgcgcgggatgccggcggacgtgctggacaacgcgttcggcgtgtcgagggaggaggcgcgcatggtcaagttcgggagggggcaggagctcgccatcttctcccccaagtccggcgccgccgcccgccgccgccgctttcccggccacagggacgacggcgtgctcgccgccccggcctga

SEQ ID NO: 528 - protein, 527 aa, Oryza sativa
MAASLLIPLCLCILLLRGASAVSDQQEAGRRDSCDRIDRRIRALEPTRRVDSEAGHTELYDDRDGQLPCAGVAAARITIQRNGLLLPSYSNSPRLAYIVHGRGIVGVVIPGCPETYQETSSSSSQEQEDDERRRRGRRGDEERRRSSEGEEEEEEETSRRSFEQSIRDEHQRITTVRQGDVVAIPAGAPFWVHNDGDSPLVAISVHDVSNNANQLDQTSRRFRLAGGQARSEGRQRYGEGESSESETERGGEESYNILSGFDTELLAESMRVSPDIARKLQGRSDKRGNIVRVRRGGLRMLRPATERVTDEEMMRGANAAAAAGNGIDEAVCLMKLRENVADPMKADLYTPNGGRITVLNSQKLPVLKLIKMSVNRGVMRRVNAILAPHWNINAHAAVYATSGSARLQVVSSEGRRVFDGELRRGQMVVVPQSFAVAGRAGDEGFAWVSFQTSDGAMNAPVVGKSSALRGMPADVLDNAFGVSREEARMVKFGRGQELAIFSPKSGAAARRRRFPGHRDDGVLAAPA

SEQ ID NO: 529 - DNA, 1311 bp, Oryza sativa
atggtactacgtcgtctgcatgacctacgccttcggcccccgccaaggatgaaaactcaaatggaagatgaattgaggacaatcgtctgcgtgccatttatcatgcatggtgtccttgagctcgggaccactgatccgatttcggaggacccggctctcgtcgaccgtatcgcggcgtcgttctgggatacgccgccccgcgcggcgttctcgtcggaggcgggagacgccgacatcgtcgtcttcgaagacctcgaccatggcaacgccgccgtcgaagcgacgacgacgacggtcccgggggagccacacgcggtagccggcggcgaggtcgccgagtgcgagcccaactccgacaacgacctcgagcagatcaccatggacgacatcggcgagctctacagcctctgcgaggagctggacgtcgtgcgccctctcgacgacgacagtagcagctgggcggtcgcggatccctggtcgtcctttcagctagttccgacgtcttctccggcgccggatcaggcgccggcggcggaagctactgacgtcgacgacgtcgtcgtcgccgctttagacagtagctccattgatggatcttgcaggccgtcgccgtcgagttttgtggcgtggaagaggacggcggactcggacgaggtgcaggccgtgccgctcatcagcggagagccgccacagaagttgctgaagaaagctgtcgccggagccggtgcctggatgaacaatggtgacagcagcgcggcggcgatgacgactcaaggaagcagcatcaagaaccatgtcatgtcagagagaaggcgccgggagaagctcaacgagatgttcctgattctcaaatcagttgtcccgtccattcacagggtggacaaagcatccattctcgcagaaacgatagcctacctcaaagagctggagaaaagagtggaagagctggaatccagcagccaaccatcgccatgtccattggaaacaagaagcaggcgaaagtgccgtgagatcactgggaagaaggtttctgcaggagcgaagagaaaggcgccggcgccggaggtggccagcgacgacgacaccgacggggagcggcgccattgtgtgagcaacgtgaacgtcaccatcatggacaacaaggaggttctcctcgagctgcaatgccagtggaaggaattgctgatgacgagagtgttcgacgcgatcaagggagtctccctggatgtcctctcggtgcaggcatcaacatcggatggtctccttggactgaagatacaagccaaggtcgtcatctcagcggctaagtag

SEQ ID NO: 530 - protein, 436 aa, Oryza sativa
MVLRRLHDLRLRPPPRMKTQMEDELRTIVCVPFIMHGVLELGTTDPISEDPALVDRIAASFWDTPPRAAFSSEAGDADIVVFEDLDHGNAAVEATTTTVPGEPHAVAGGEVAECEPNSDNDLEQITMDDIGELYSLCEELDVVRPLDDDSSSWAVADPWSSFQLVPTSSPAPDQAPAAEATDVDDVVVAALDSSSIDGSCRPSPSSFVAWKRTADSDEVQAVPLISGEPPQKLLKKAVAGAGAWMNNGDSSAAAMTTQGSSIKNHVMSERRRREKLNEMFLILKSVVPSIHRVDKASILAETIAYLKELEKRVEELESSSQPSPCPLETRSRRKCREITGKKVSAGAKRKAPAPEVASDDDTDGERRHCVSNVNVTIMDNKEVLLELQCQWKELLMTRVFDAIKGVSLDVLSVQASTSDGLLGLKIQAKVVISAAK

SEQ ID NO: 531 - DNA, 1443 bp, Oryza sativa
atggccgggaacttgctagccaactatgttcaagtcaatgtcatgctccccctggatgtggtgactgtggacaacaagttcgagaaggtcgatgagacccgggcacagctgaagaagctgacggaggccggcgtcgatggcgtcatggtggacgtgtggtgggggctggtggaggggaagggccccgggtcctacgactgggaggcctacaagcagctgttcaggctggtgcaggaggccgggctgaagctgcaggccatcatgtcgttccaccagtgcggtggtaacgtcggcgacatcgtcaacatcccgatcccgcagtgggtgcgggatgtcggcgcgagcgaccccgacatcttctacaccaaccgtggtggggcgaggaacatcgagtacctcacccttggagtggatgaccagcctctcttccatggaagaactgccatccagatgtatgctgactacatgaagagcttcagggagaacatggcagagttcttggatactggtgtcattgtggacattgaggtggggcttggtccagctggtgagatgagatacccttcctacccccagagccagggatgggtgttcccaggcataggagaattcatatgctatgataaatacctggaggcagatttcaaagcagaagcagcaaaggctgggcatcctgaatgggaattgcccgacgatgctggagagtacaatgacactcccgagaagacccggttcttcgcggataatggaacatatgtcactgagaaggggaagttcttcctcacatggtactcaaacaagctgataaaaccatggagacaagatctttggatgaagcaaacaaggtcttcttgggatgcagagtgcagctggcaatcaaaggttccaaaccatgcagctgagctcactgctggatactacaacttggacaacagagatggctacagaaccatcgcacgcatgctcacaaggcaccgtgcctgcgttaacttcacatgtgctgagatgagggattctgaacaaagctcagaggcaaagagtgcaccagaagaactagtccaacaggtcctgagtgctggatggagagagggcttacatgtggcatgcgaaaacgcactcggtcgatacgatgcaacagcttacaacacaatactaaggaattcaaggccgacaggcatcaacaagaatggacctcctgagcacaagctatttggattcacctacctccgattatcagacgagctgctggagggacagaactacagcacattcaaaactttcgtcaagaggatgcatgctaacctggattataattcaaatgttgacccattggagcctttgcaaagatcaatgccagaaatgccaattggaaagatcttacaagcagcacacccaaaattggcgccatttccctttgatgagaataccgacctgccggtttaa

SEQ ID NO: 532 - protein, 480 aa, Oryza sativa
MAGNLLANYVQVNVMLPLDVVTVDNKFEKVDETRAQLKKLTEAGVDGVMVDVWWGLVEGKGPGSYDWEAYKQLFRLVQEAGLKLQAIMSFHQCGGNVGDIVNIPIPQWVRDVGASDPDIFYTNRGGARNIEYLTLGVDDQPLFHGRTAIQMYADYMKSFRENMAEFLDTGVIVDIEVGLGPAGEMRYPSYPQSQGWVFPGIGEFICYDKYLEADFKAEAAKAGHPEWELPDDAGEYNDTPEKTRFFADNGTYVTEKGKFFLTWYSNKLIKPWRQDLWMKQTRSSWDAECSWQSKVPNHAAELTAGYYNLDNRDGYRTIARMLTRHRACVNFTCAEMRDSEQSSEAKSAPEELVQQVLSAGWREGLHVACENALGRYDATAYNTILRNSRPTGINKNGPPEHKLFGFTYLRLSDELLEGQNYSTFKTFVKRMHANLDYNSNVDPLEPLQRSMPEMPIGKILQAAHPKLAPFPFDENTDLPV

SEQ ID NO: 533 - DNA, 3231 bp, Oryza sativa
atgaagtactttgaagagaaggtccatgctggggagtgggatgaagtggagaaatatctttcaggtttcaccaaggtggatgacaataggtattctatgaagatattctttgagatcagaaagcagaagtatttggaagcacttgacaggcatgatagagcaaaggcagtagatattcttgttaaagatcttaaagtcttctcgacattcaacgaggagttatataaagagataacacagcttctaactcttgagaatttcagggaaaatgaacagctgtctaagtacggggataccaaatctgctcgcagtataatgctgattgagctcaaaaaacttattgaagcgaacccccttttccgggaaaagcttgttttcccaactctcaaggcatcacgccttcggactttaatcaaccaaagcttgaactggcagcatcagctttgtaagaatcctcggccaaatccagatatcaagactttgttcactgatcatacctgcactccgccaaatggagctcgtgcttcaccagtttctgtaccactggcagcggttccaaaggccggtggcacatacccaccacttacagctcatactccatttcaacctcctcctgctggtccatctttagcgggttggatggcaaatgctgctgctgctacatcatctgttccatctgctgttgtggcggcatcatcactacctgttccgccaaatcaagctgtcccaatcatgaaacgaccaactataacagactatcaaagtgcagaatctgagcaactaatgaagcgattgaggccaagtggacatggtgttgatgaggccacctatcctgcaccaattccccaacctttatggtcagtggaggatcttcccaggacagtagcttgtacattgtcacagggatctagtgtaaccagcatggattttcatccaactcggcatacactattactagttggatctaccaatggtgaaattacactttgggaggttggtatgcgtgagagactgttttcaaagcccttcaaaatttgggacattcaagcttgttcaccacaatttcaggtttcctttgtggtttcaggtgtcgcatttgcaaaacatttgattcatctgcatgcatatcagcaaccaaatgagacgcggcaagttctagagattgacgctcattctggagcagttaatgacatagcattctcccggccaaataagcaactttgtgttgtcacttgtggagatgataggctgataaaggtctgggatatgcatggacagaaactgttttcatttgaagggcatgaggcaccagtgtattccatctgccctcaccacaaagagagtattcagtttatcttctcaacctccctcgacgggaaaattaaggcatggctttatgatcatatgggatccagggtagattatgatgctccaggaaaatggtgtactactatgctttatagcgctgatggaactaggttgttctcatgtggaacaagtaaagatggagattcatatttagttgagtggaatgaaagtgaaggatctatcaagaggacatattctgggtttcgtaaaaagtcagctggtgttggtgtggtgcagtttgacacagctcagaatcacattttggctgctggtgaagataatcagattaagttctgggatgttgataatacaaccatgcttagctctactgaagctgacggaggcttaccgggtcttccacggttgaggttcaataaagaaggcaatcttcttgctgttactacagtggacaatgggtttaagatacttgcaaatgctgatggactcagaactttacgagcatttggaaaccgacctttcgaagcatttagatcgcaatatgaagcttcttctatgaaggtctctggtgctcctgttgttgcgggcatttctcctaatattggtcggatggatcacatcgacaggaattctcctgcaaagccatctcctataatgaatggtggtgatccagcatctagaagcatcgatataaagcctagaatttcagaagaaaggcccgataaagcaaaaccctgggagctgatggaagtcctaaatgctcagcaatgccgtgtagctacaatgccagaaactccagaccaagccagcaaggttgtcagacttctgtacacaaattctggtgttggcttgctagcacttggttccaatgccattcaaaggctgtggaaatgggctcggaatgatcaaaatccaagtgggaaggccacagccaatgtagtgccacaacattggcaaccaaacagtggtcttgtcatgcaaaatgatacagcagataccaatcctgaggatgcagttccatgcattgctctctccaagaatgattcttatgtgatgtctgcatgtggtgggaaggtttcactgtttaacatgatgacatttaaggtgatgacaacattcatgccaccacctccagcatcaacctttttagcatttcaccctcaagacaataatatcatagcaattggaatggaagattcaaccatccatatatacaatgtcagggtagatgaggtcaaaactagattgaaagggcatcaaaggaggataactggtttggccttctcaaacaacctacaaatacttgtgtcttcaggggctgatgcacagctttgtgtgtgggccaccgatacttgggaaaagaaaaaatctgttgctattcaaatgccagctgggaaaactccatcaggggatacttgggtccagtttaactctgactggagtcgtttgttagtagtacatgagactcagctagctatatatgatgcatcaaaaatggaaagaatctaccagtggatacctcaggacgctttgtcagctcccatttcacatgcatcatactcacgcaacagccagttggtttttgctgcctttaccgatggtaacataggaatttttgatgtggagaacttgagattaagatgccgaattgcacctccagcatacttatcttctgcagccataaacagcaatccatcggtctaccctcttgtcgtcgctgcacatccacaggagtcgaatcaatttgcggttgggctttcagatggatctgttaaagtgattgaacccttggagtccgaagggaagtggggaacgacgcctcccacggaaaacggggtgcccaatggcaggacgtcaacatcatcagcaactagcaacccagctgcagaccaaatccaaagatag

SEQ ID NO: 534 - protein, 1076 aa, Oryza sativa
MKYFEEKVHAGEWDEVEKYLSGFTKVDDNRYSMKIFFEIRKQKYLEALDRHDRAKAVDILVKDLKVFSTFNEELYKEITQLLTLENFRENEQLSKYGDTKSARSIMLIELKKLIEANPLFREKLVFPTLKASRLRTLINQSLNWQHQLCKNPRPNPDIKTLFTDHTCTPPNGARASPVSVPLAAVPKAGGTYPPLTAHTPFQPPPAGPSLAGWMANAAAATSSVPSAVVAASSLPVPPNQAVPIMKRPTITDYQSAESEQLMKRLRPSGHGVDEATYPAPIPQPLWSVEDLPRTVACTLSQGSSVTSMDFHPTRHTLLLVGSTNGEITLWEVGMRERLFSKPFKIWDIQACSPQFQVSFVVSGVAFAKHLIHLHAYQQPNETRQVLEIDAHSGAVNDIAFSRPNKQLCVVTCGDDRLIKVWDMHGQKLFSFEGHEAPVYSICPHHKESIQFIFSTSLDGKIKAWLYDHMGSRVDYDAPGKWCTTMLYSADGTRLFSCGTSKDGDSYLVEWNESEGSIKRTYSGFRKKSAGVGVVQFDTAQNHILAAGEDNQIKFWDVDNTTMLSSTEADGGLPGLPRLRFNKEGNLLAVTTVDNGFKILANADGLRTLRAFGNRPFEAFRSQYEASSMKVSGAPVVAGISPNIGRMDHIDRNSPAKPSPIMNGGDPASRSIDIKPRISEERPDKAKPWELMEVLNAQQCRVATMPETPDQASKVVRLLYTNSGVGLLALGSNAIQRLWKWARNDQNPSGKATANVVPQHWQPNSGLVMQNDTADTNPEDAVPCIALSKNDSYVMSACGGKVSLFNMMTFKVMTTFMPPPPASTFLAFHPQDNNIIAIGMEDSTIHIYNVRVDEVKTRLKGHQRRITGLAFSNNLQILVSSGADAQLCVWATDTWEKKKSVAIQMPAGKTPSGDTWVQFNSDWSRLLVVHETQLAIYDASKMERIYQWIPQDALSAPISHASYSRNSQLVFAAFTDGNIGIFDVENLRLRCRIAPPAYLSSAAINSNPSVYPLVVAAHPQESNQFAVGLSDGSVKVIEPLESEGKWGTTPPTENGVPNGRTSTSSATSNPAADQIQR

SEQ ID NO: 535 - DNA, 1560 bp, Oryza sativa
  misc_feature (774)..(774): n = any nucleotide
atggcggttgtttttgtagggatcagtgtgaacgcgacgtacgggacgttcatccgagcgatcaaggaggacatcttcttgaagtggaacgggagtaactacctcggtgtggtgtggccggggaacgtctccttcccggacttcctcaacccgcgcgccgccgagttctgggcgcgcgagatcgccgcgttccggcggaccctccccgtcgacgggctgtggatcgacatgaacgagatctccaacttcgtcgacccgccgccgctcaacgcgctcgacgacccgccgtaccgcatcgacaactccggcgtgcgccgccccatcaacaacaagacggtgccggcctccgccgtgcactacggcggcgtggccgagtacgacgcgcacaacctcttcggcttcctcgaggcgcgggccacgcacgacgcgctgctccgtgacaccggccgccgcccgttcgtgctcagccgctccacgttcgtcggctccggcaggtacaccgcgcactggaccggcgacaacttcgcgacgtgggacgacctccgctactccatcaacactatgcttagcttcggcctcttcggcatccccatgatcggtgccgacatctgcggcttcggcggaaacaccaccgaggagctctgcagccgatggattcagcttggcgcgttctacccgttctcgagggaccactcggcgatcggcaccgtccggcgagagctgtacctgtgggaatcggtggcgaggtcggcgaggaaggcgctcggcctgcgntaccggctgctcccctacttgtacacgctcatgtacgaggcgcacaccacgggcgcgcccatcgcgcggccgctcttcttctcctaccccggcgacgtcgcgacgtacggcatcgacaggcagttcctgctcggccgcggcgtgctcgtgtcaccggtgctcgagccgggcgcgaccaccgtcaccgcctacttcccggcgggacggtggttcagcctctacgacttctccctcgccgtcgccacgaagaccggcaagcgcgtgacgctgcccgcgccggcggacacggtgaacgtgcacgtcgccggcgggaacatcctgacgctgcagcagcccgcgctgacgtcgtcgcgcgtgcgccagagcgtggtccacctcctggtcgccctcgccgaggacggcacggccaccggggatctcttcttggacgacggcgagtcgccggagatggtcggggcgcggagcaggtggagccagatcaaattcagcggcgcgaccgagagcggcggcagcgtcgtcagagtgaggtcgcacgtggtgcacgactcgtacgcgccgagccggacgatggtcatcgccaaggtggtgctcatggggcttcgatcgccggtgccgcccaaggggttcgccgtttatgccaacggcgtccaggtgaacgcgagcacggcggtcgacggcggcggcggcgggaacccggagaagggagcgctgggcgtggcgcacgtcggcgggctgtcgctggtcgtcgggcaggagttcgatctcaaggtcgttatgacctattaa

SEQ ID NO: 536 - protein, 519 aa, Oryza sativa; identical to SEQ ID NO: 116

SEQ ID NO: 537 - DNA, 2961 bp, Oryza sativa
  misc_feature (85)..(85): n = any nucleotide
atggcgaccgcctcggcgccgctgcagctggccaccgcgtcccggccgctccccgtcggcgtcggctgcggcggaggaggaggcngggggctccacgtgggtggtgcccgcggcgggggcgcggcaccggcgcggcggcggctggcgtgcgtaaaatgggaactctgttatttctgtatctcgaataagatttcaagtgtgctaaattccatcgattcctctaccattgcatcaaacattaagcaccatgcggagttcacaccagtattctctccagagcacttttcacctctgaaggcttaccatgcaactgctaaaagtgttcttgatactctgataatgaactggaatgcaacatatgactattacgacagaacaaatgtgaagcaagcgtattacctgtccatggagtttttacagggaagagctctcactaatgccgttggtaaccttgagctaactggacaatacgcagaagcactacaacaacttggacacagcctagaggatgttgctacccaggagccagatgctgcccttgggaatggtggtctaggccggttagcttcctgtttcttggattctctggcaaccctaaattatccagcatggggatatggacttcgatacaaacatggcctctttaagcaaatcataacgaaggatggtcaggaggaggtagctgaaaattggctcgagatgggaaatccttgggagattgtaagaaccgatgtctcctatcctgtgaagttctatggtaaagtggttgaaggcactgatgggaggatgcactggattggaggagaaaatatcaaggttgttgctcatgatatccctattcctggctacaagactaaaactaccaacaatcttcgtctttggtcaacaacagtgccatcacaagatttcgatttggaagcttttaatgctggagatcatgcaagtgcatatgaagctcatctaaatgctgaaaagttagcacatggtgaaatggcttttgaagtggaagccccatacctcaaggcatgtgaattgtatttattaccgcattcttatttgtgtcattcattctcaattatgatatgtcacgtactgtatcctggggacgaatcaccagaggggaaagttcttcgcctgaagcaacaatatacattatgctcagcctcactacaggatattattgctcgtttcgagaggagagctggtgattctctcagctgggaggacttcccctctaaagttgcagtgcagatgaatgacactcacccaacactgtgcattcctgagttgatgagaatattgattgatgttaaagggttaagctggaatgaggcttggagtatcacagaaagaactgtggcatacacaaaccacacggtgcttcctgaagctctggagaagtggagcttggacataatgcagaaacttcttcctcggcatgttgaaatcatagaaaaaattgatggggagctgatgaacatcattatctcaaaatacggaacagaagatacttcactgttaaaaaagaagattaaagaaatgagaatcttagacaacattgacctaccagattctattgccaaactatttgtgaaaccaaaagagaaaaaagaatctcctgctaaattgaaagagaaattgcttgtcaaatctctggagcctagtgttgtggttgaggagaaaactgtgtccaaagtagagataaacgaggactctgaggaggtggaggtagactctgaagaagttgtggaggcagaaaacgaggactctgaggatgagttagatccatttgtaaaatcagatcctaaattacctagagttgtccgaatggctaacctttgtgttgttggtgggcattcggttaatggtgtggctgcgattcacagcgagattgtgaaagaagatgtattcaacagcttttatgagatgtggcccgctaaatttcaaaataaaacaaatggagtgactcctagacgttggattcggttttgtaatcctgaattaagtgcaatcatttcaaaatggataggatctgatgattgggttttgaacactgataaacttgctgaattaaagaagtttgctgatgatgaggatctgcaatcagaatggcgtgctgctaaaaaggctaacaaggtgaaggttgtttctctcataagagaaaaaacaggatatatcgtcagtccagatgcaatgtttgacgttcaggtgaaaaggatccatgagtataagcgacagctgctaaatatccttggaattgtctaccgctacaagaagatgaaagaaatgagtgcaaaagacagaataaatagctttgttccaagggcaaagaggatagtgaagtttattacagatgttgcagctactgtaaatcatgatccagaaattggagatctattgaaggttgtatttattccagattataatgttagtgttgctgaggcgctaatccctgccagtgaattgtctcagcatatcagtactgctggaatggaagctagtggaaccagcaacatgaagtttgcaatgaatggatgtatccttattggaactttggatggtgctaatgtggaaatcagagaggaggttggagaggaaaactttttcctttttggtgctgaggcacatgaaattgctggtttaaggaaagagagagcccagggaaagaggttaagagatttgtccgcagttggggtctttggaacttacaactacgatgacttgatgggttctctggaaggaaatgaaggttatgggcgtgcagactattttcttgttggtaaagatttccccagctacattgaatgccaggagaaggttgataaagcataccgcgatcagaaactatggacaaggatgtcaatcctcaacacagccagttcctccaagttcaacagcgaccggacgattcacgagtacgccaaggacatctgggacatcaagcctgtcatcctgccctag

SEQ ID NO: 538 - protein, 986 aa, Oryza sativa
MATASAPLQLATASRPLPVGVGCGGGGGRGLHVGGARGGGAAPARRRLACVKWELCYFCISNKISSVLNSIDSSTIASNIKHHAEFTPVFSPEHFSPLKAYHATAKSVLDTLIMNWNATYDYYDRTNVKQAYYLSMEFLQGRALTNAVGNLELTGQYAEALQQLGHSLEDVATQEPDAALGNGGLGRLASCFLDSLATLNYPAWGYGLRYKHGLFKQIITKDGQEEVAENWLEMGNPWEIVRTDVSYPVKFYGKVVEGTDGRMHWIGGENIKVVAHDIPIPGYKTKTTNNLRLWSTTVPSQDFDLEAFNAGDHASAYEAHLNAEKLAHGEMAFEVEAPYLKACELYLLPHSYLCHSFSIMICHVLYPGDESPEGKVLRLKQQYTLCSASLQDIIARFERRAGDSLSWEDFPSKVAVQMNDTHPTLCIPELMRILIDVKGLSWNEAWSITERTVAYTNHTVLPEALEKWSLDIMQKLLPRHVEIIEKIDGELMNIIISKYGTEDTSLLKKKIKEMRILDNIDLPDSIAKLFVKPKEKKESPAKLKEKLLVKSLEPSVVVEEKTVSKVEINEDSEEVEVDSEEVVEAENEDSEDELDPFVKSDPKLPRVVRMANLCVVGGHSVNGVAAIHSEIVKEDVFNSFYEMWPAKFQNKTNGVTPRRWIRFCNPELSAIISKWIGSDDWVLNTDKLAELKKFADDEDLQSEWRAAKKANKVKVVSLIREKTGYIVSPDAMFDVQVKRIHEYKRQLLNILGIVYRYKKMKEMSAKDRINSFVPRAKRIVKFITDVAATVNHDPEIGDLLKVVFIPDYNVSVAEALIPASELSQHISTAGMEASGTSNMKFAMNGCILIGTLDGANVEIREEVGEENFFLFGAEAHEIAGLRKERAQGKRLRDLSAVGVFGTYNYDDLMGSLEGNEGYGRADYFLVGKDFPSYIECQEKVDKAYRDQKLWTRMSILNTASSSKFNSDRTIHEYAKDIWDIKPVILP

SEQ ID NO: 539 - DNA, 582 bp, Oryza sativa
atgccctcctctttcctctctcctctcctctcgccgtcgccaattctctcctcctccttcccccgtggggatgcggcggctatggcggtggataaagataaagagttcaaaattgattggaagagggtgggcatcacaagctcatttggatttgcttttgttggaccagttggacattactggtatgaatacttggatcgcttcatcctgaggagataccagcctaagaccttcaaatttgttgcgtcaaaagttgctgcggatggtctcctatttggaccagtagatcttctcttgttcttctcatatgttggtcttgcatcaggaaggagtgtagagcaggtgaaggatgatgtgaagagggacttcattcctgctctagttctagggggaaccatctggccagccgtgcaaatcgcaaatttccgcttcattcctgtgcgatatcagctcctttacgtgaacctgttctgcctcttagacagttgcttcttgtcgtggatcgatcaacaaggagatgcaccttggaagcaatggttcacatcattccagaaaatcgaaggccagaagggcaaggtttga

SEQ ID NO: 540 - protein, 193 aa, Oryza sativa
MPSSFLSPLLSPSPILSSSFPRGDAAAMAVDKDKEFKIDWKRVGITSSFGFAFVGPVGHYWYEYLDRFILRRYQPKTFKFVASKVAADGLLFGPVDLLLFFSYVGLASGRSVEQVKDDVKRDFIPALVLGGTIWPAVQIANFRFIPVRYQLLYVNLFCLLDSCFLSWIDQQGDAPWKQWFTSFQKIEGQKGKV

SEQ ID NO: 541 - DNA, 1860 bp, Oryza sativa
  misc_feature (1035)..(1035): n = any nucleotide
atgggcaatccttctattctcacggaggatttaggcgatacgtctgactttgaggttgatggcgtcgagaacctcacggagaatgatgtcagtgatgaggagattgatgccgaggagctggcccgacggatgtggaaagacaagatcaagctgaagaggatcaaggagaggcagcagaagcttgctctgcagcaggcagcactagaggagtccaaaacaaagaagatgtctgagcaggctctccgcaagaagacggcgagagtccaggatgggatcttgaggtacatgctcaagctgatggaggtgtgcaatgctcgtgggtttgtttatgggatcattcctcataaagggaagcctgtcagtggtgcatcggataacattagagcttggtggaaggagaaggttcggttcgatgtgaatgggccggttgccattgcaaagtatgaggttaagaactcaatgctggttgatgctaagcgcagaggggtcttgaaccagcatagcttgatggatctccaggatgctaccctgggatcattgctctcatcgttgatgcagcattgcagcccgcagcagcgcaagtacccactggataagggtgtccctcccccatggtggccatcaggaaatgaggattggtggatttctttaggccttccaatgggaatatcaccaccatacagaaaaccgcatgatcttaagaaggtttggaaggttggcgtgctgacgggtgtgatcaaacacatggccccaaactttgataagatcaggaattgtgtaaggaaatcgaagtgcttgcaagacaaaatgactgctaaagagagcttgatttggctgggagttcttcgaagagaggaaatatattttcgcagttctgacaatgttggatcacagattacacaccgtagttctcgtgagggaaaaagtgatgatatatatagcagcagtgatgagtatgatgtcgaccatttggaggaacctcctcgctcttcatcatccaaagataatgtggggcgtcgtcagccaactgcgcanatcagagaggagcatacctctagtcgacacaacagaggacgccatgatcagcaacccaatcaagtacttcctagcaatgaagggaccaatgaatcaaggaagagaaagagacctagtggtcatttacttactgctgaatctgaggttgaggtaacacaaaaagatgacaatcaactagccattgtgagcaatgcattgcccaatatgagcagaataaaccaaacggagatgatgggcatggctaaccagatgacaagcctcagccatgtcaatacaactgaaactctacagcatcaatatgttcaagggaacttcgtatcttctcctgctgctgtggttaataactataacagcaaccagattacaaatgttaatccttcaaggatttatatgggatatcagcctttagcatgccaaaataatggtcacacaaatccatggtctgaagacacttttcaggttgatgttggtccaccacctattggttttactactaattcttcgtcaggtggtaatcattcttttcccatgaaacaatcactaccaaaatctatagatgatcatgtgcctattacggagacaggggtgttggctgatagcagttcatatggttatcatatcacagccacaggtagtaggaattcaacctctgttgctggccatggaaatcagctcatgggagatcctttcgacagtggtactgctgataagttcaatgggaattcgtttgatggattgccttttgacttcattggtagtagtccaatccctgacatcggtgtattgctagatgatgatgatataatgccatatctgggaacataa

SEQ ID NO: 542 - protein, 619 aa, Oryza sativa
MGNPSILTEDLGDTSDFEVDGVENLTENDVSDEEIDAEELARRMWKDKIKLKRIKERQQKLALQQAALEESKTKKMSEQALRKKTARVQDGILRYMLKLMEVCNARGFVYGIIPHKGKPVSGASDNIRAWWKEKVRFDVNGPVAIAKYEVKNSMLVDAKRRGVLNQHSLMDLQDATLGSLLSSLMQHCSPQQRKYPLDKGVPPPWWPSGNEDWWISLGLPMGISPPYRKPHDLKKVWKVGVLTGVIKHMAPNFDKIRNCVRKSKCLQDKMTAKESLIWLGVLRREEIYFRSSDNVGSQITHRSSREGKSDDIYSSSDEYDVDHLEEPPRSSSSKDNVGRRQPTAHIREEHTSSRHNRGRHDQQPNQVLPSNEGTNESRKRKRPSGHLLTAESEVEVTQKDDNQLAIVSNALPNMSRINQTEMMGMANQMTSLSHVNTTETLQHQYVQGNFVSSPAAVVNNYNSNQITNVNPSRIYMGYQPLACQNNGHTNPWSEDTFQVDVGPPPIGFTTNSSSGGNHSFPMKQSLPKSIDDHVPITETGVLADSSSYGYHITATGSRNSTSVAGHGNQLMGDPFDSGTADKFNGNSFDGLPFDFIGSSPIPDIGVLLDDDDIMPYLGT

SEQ ID NO: 543 - DNA, 507 bp, Oryza sativa
atggaaatggcggcggcggccgtcggcgtgctgctgccgttcccgttctactgggcgctctggaaccacccgcagcggtgggtcgacctgtgcggcggaggcggcggcggcgtggacccgtgccgccggatggcgcaggtgtcccacgtcctcaaggcgctgcagctcctcgccctcgcctccgtcgcctccttctcctggccgccgccgctctactccgtcgccctcctcgccgtcggccagtacctcaatttcaaggtgtaccagctgctcggtgagccaggcacctactacggtgttcgatttggaaagaaaatcccatgggtgacagaatttccatttggttatatcaaagaccctcaatatgttggcagcatgctcagccttgtggcactgctttgttgggttccattccaatatgttcttctctggtgcctcggctacgttttcatgatgtgggtggaaagcaaggaagatcctgccactcgtgccaagctgctctcctga

SEQ ID NO: 544 - protein, 168 aa, Oryza sativa
MEMAAAAVGVLLPFPFYWALWNHPQRWVDLCGGGGGGVDPCRRMAQVSHVLKALQLLALASVASFSWPPPLYSVALLAVGQYLNFKVYQLLGEPGTYYGVRFGKKIPWVTEFPFGYIKDPQYVGSMLSLVALLCWVPFQYVLLWCLGYVFMMWVESKEDPATRAKLLS

SEQ ID NO: 545 - DNA, 1632 bp, Oryza sativa
atggatccgaggcgcagccactgggagagctcgtcggaggacgtgacgaggccgctgctcccgctgcacgacgacgacggcgcggcgggccggcgctcctgcgccgcgctgaggtcgctgctcgccaacaagtacctggcggtcgcgtcgggccccgtggcgtgcgcgctgatctgcggcctcgtcgacctcggcggccaccgcgccgcgcgcaacatgctcggggtgctcgcctgggtgttcctgtggtggattaccgacgccgtgccgctcgccgtcgcgtccatggcgccgctgttcctcttccccgtgttcggcatctcctcctccgacgccgtcgccaaggcctacatggacgacgtcatctccctcgtcctcggcagcttcatcctcgcgctcgccatcgagcactacaacatccaccgccgcctcgctctcaacatcacgtcgctgttctgcggcgacccggtgaagccgccgctgctgctgctgggaatctgcggcaccaccatgttcatcagcatgtggatccacaacacaccgtgcaccgtgatgatgatgccggtggcgacggggatcctgcagcggttcccgcgcgtcgacggggcgtcgtcctcggcgagcagcgccgcggacgcgcgggaggtgcagcggttctccaaggcggtggtgctcggcgtcgtgtacgcgtcggcgatcggcgggatggcgacgctgacgggcaccggcgtgaacatcatcctggtggggatgtggtccacctacttcccggagcagccgcccatcaccttcagctcgtggatgtcgttcgggctcccattggcgctcgtcctcttcgtcgcgctctgggccacgctctgcgtcctgtactgctccaagaacaccgggagggcgctctcagcttacctggacaggagccatctcaggagggagctcagcttgcttggtcctatggcttttgcagagaagatggttctagccgtttttgggggtttgattgtcctatggatgacgaggagcctgacagatgatattcctgggtggggatcactcttccacggcgaagttggggatggaactgtcactatcatgatggcgacgctgctgttcataatcccgagcggcaagaacgacggcgagaagctcatggactggggcaagtgccggaggctgcagtggaacatcatcctcctcctcggcgccggcttcgccatcgccgacggcttcagggcgagcggcctgaccgacatcctctccgaggggctcggcttcctccgcggcgcgccggcgctggccatcgcgcccgtggcgtgcgtcttcagcggcgccatcaccgagttcacctccgacgacgcgaccgccacgctggtgctcccgctgctcgccgagctgggcaagtccatcggcgtgcacccgctcctcctcatggtccccggcgccgtcggcgcgcagctgtcctacctgctgcccaccggctcgccgggcaacgtcgtcggcttcagcacgggctacatcagcatcaaggacatggtgatcgccggaacgcccctgaaaattgtcggggttgcagctctcaccatcctactgccaacgttaggatccgtcgtttttggcatggatcagaagctatag

SEQ ID NO: 546 - protein, 543 aa, Oryza sativa
MDPRRSHWESSSEDVTRPLLPLHDDDGAAGRRSCAALRSLLANKYLAVASGPVACALICGLVDLGGHRAARNMLGVLAWVFLWWITDAVPLAVASMAPLFLFPVFGISSSDAVAKAYMDDVISLVLGSFILALAIEHYNIHRRLALNITSLFCGDPVKPPLLLLGICGTTMFISMWIHNTPCTVMMMPVATGILQRFPRVDGASSSASSAADAREVQRFSKAVVLGVVYASAIGGMATLTGTGVNIILVGMWSTYFPEQPPITFSSWMSFGLPLALVLFVALWATLCVLYCSKNTGRALSAYLDRSHLRRELSLLGPMAFAEKMVLAVFGGLIVLWMTRSLTDDIPGWGSLFHGEVGDGTVTIMMATLLFIIPSGKNDGEKLMDWGKCRRLQWNIILLLGAGFAIADGFRASGLTDILSEGLGFLRGAPALAIAPVACVFSGAITEFTSDDATATLVLPLLAELGKSIGVHPLLLMVPGAVGAQLSYLLPTGSPGNVVGFSTGYISIKDMVIAGTPLKIVGVAALTILLPTLGSVVFGMDQKL

SEQ ID NO: 547 - DNA, 1293 bp, Oryza sativa
atggcgctgaattactcgtcgtgctcgctcaccagctcgttcctgatgaacgaggactgcgctggcatgatgtgtgggtgcgggtgctggtcggaggaggcctcgccgctgtcatccggtggggtgaactccctgtggtgggatgagctggagtttgagctggagctggaagaggaagaggagttcgaccctgtggacctcttgcctaccgaccccttcggcatgaacctggagaccacgttcaccgcggcgatcgccagttgcattgaggacctcacagtcatgtccagtgctgggcgttttggagacagccgcgatgatgctgtttttgccgacctgagttattacttgaataaggcttttgttctatcaccggagtttcagtttggtggctatcggggtgtttttgaaggccccttggggtttggaggcctttctgctggtgaaggtgattcttttgggttcatgaagaacccttcttcctcaggaaatgctgatgattcttttgggttcgtggagacccctcctacctctggaaatgctgcattggagtgcggcgatgcagttgaagttgttcctgtccaggagggaggagttccacatgagggaatgctgtttgcccttgactaccttggccttcgtgacatcctctctgttgagagagtgtgtaagacattgcattcggctgtcagaaatgagcccttactgtggaagtccatccacattgaaggggatttgcgccagagaatttctgatgctggtcttctacacctgacacagaagtgcccagatactttgcagtgtctaagtattgcgtgctgcgtaaatatcacagaccaggggctgaaggctgttttagaaagtaatccaagattaacaaagctgagcattttgggctgcccacggttaactttggatggccttatttccaatctcaagtcatttaatacgaaggcggtgtttggaattaagcacctcagagttggaacactcttcagtttacgaaaggagcagtacgaagagttattatccttgttgaataccgacaagacacaggaggtgcataaccgggggccaagattccttcatgctaatcggtttttatcagattgcaatgatggatatgctcttgatattgagatgtgccctatttgtcagaactacaaacttgtttatgattgcccagatgaaggatgtgatgacagaagatctgggattgcggttcaagagcggaagtacagcgtgaactttacgtcagtattgcagcagctgctgctgttcttggaatgttaa

SEQ ID NO: 548 - protein, 430 aa, Oryza sativa
MALNYSSCSLTSSFLMNEDCAGMMCGCGCWSEEASPLSSGGVNSLWWDELEFELELEEEEEFDPVDLLPTDPFGMNLETTFTAAIASCIEDLTVMSSAGRFGDSRDDAVFADLSYYLNKAFVLSPEFQFGGYRGVFEGPLGFGGLSAGEGDSFGFMKNPSSSGNADDSFGFVETPPTSGNAALECGDAVEVVPVQEGGVPHEGMLFALDYLGLRDILSVERVCKTLHSAVRNEPLLWKSIHIEGDLRQRISDAGLLHLTQKCPDTLQCLSIACCVNITDQGLKAVLESNPRLTKLSILGCPRLTLDGLISNLKSFNTKAVFGIKHLRVGTLFSLRKEQYEELLSLLNTDKTQEVHNRGPRFLHANRFLSDCNDGYALDIEMCPICQNYKLVYDCPDEGCDDRRSGIAVQERKYSVNFTSVLQQLLLFLEC

SEQ ID NO: 549 - DNA, 1044 bp, Oryza sativa
  misc_feature (335)..(335): n = any nucleotide
atggagcgcgcagtgcgggagctgtgggcggagtcgcgggacctgctgggcctccactccccggacgacgccgccgccgccgacgccgcgatgccccgcgccgagatgcccccgacgccgctcgcgtttctccgcgaccacgtctcgccggggcgccctctcctcgtgtcctccgccgccaccagccactggccggccgcctcgctgtggccgaccgactcctacctcaccgacgcgctccgctccaccgccgtctcgctccacctcacccccgacggccgcgccgaggccttggcccgcaaccgggcccgagccaccccggggccaagtgcttngcctccgggcaagtccgccagctccgatacggcctccggcctggtggcctacgcgcagcagcaggacgactgcctgcgcggggagtacgccgccgtcgccggcgacgtggacgcgcacgtgccctgggccagcgacgcgctcggctgcctccccgaggccgtcaacctctggatcggcagcgcctgctcccagacctccttccacaaggaccactacgacaacatctacgtcgtcgtctccggcgagaagcacttcctcctcttgccccccaccgagcaccaccgcctctacgtccgcgactaccccgccgcccactacgccgcggaagatgaagcggagctgaggcttaagctggagctggaggagcccgagaggatcgtgccatggagcagcgttgacccctacccgccgtcgccggaggaggcggccgcgcaggcgtcatccttcccgctctacttcgaggggccgaggccgatccgctgcacggtgcgcgccggcgagatgctctacttgccgagcatgtggtttcaccatgtgagccagagccccgggccgaacgggctcaccattgcagtgaactactggtatgacatgcagtttgacattaagtatgcctacttcaacttcttgaggtcattggagatcgatggtagttcgtcgaaaaagacggatgctttggaagacgatctcgaggagacgaatgattga

SEQ ID NO: 550 - protein, 347 aa, Oryza sativa
MERAVRELWAESRDLLGLHSPDDAAAADAAMPRAEMPPTPLAFLRDHVSPGRPLLVSSAATSHWPAASLWPTDSYLTDALRSTAVSLHLTPDGRAEALARNRARATPGPSASPPGKSASSDTASGLVAYAQQQDDCLRGEYAAVAGDVDAHVPWASDALGCLPEAVNLWIGSACSQTSFHKDHYDNIYVVVSGEKHFLLLPPTEHHRLYVRDYPAAHYAAEDEAELRLKLELEEPERIVPWSSVDPYPPSPEEAAAQASSFPLYFEGPRPIRCTVRAGEMLYLPSMWFHHVSQSPGPNGLTIAVNYWYDMQFDIKYAYFNFLRSLEIDGSSSKKTDALEDDLEETND

SEQ ID NO: 551 - DNA, 1281 bp, Oryza sativa
atggcgaccgactcctcctcctccgctgccgccgataagaacaccgtcttccgcaagctccgcgccaaatcagacaacaagatgtgcttcgactgcaacgccaagaacccgacctgggcctccgtcacctacggcgtcttcctctgcatcgactgctctgccgtccaccgtagcctcggcgttcacgtctccttcgtcaggtcaacaaatttggattcgtggaccccagaacaattgaaaatgatggtttatggaggtaacaaccgtgcacaagctttcttcaagcagcatggttggacagatggtggaaaaattgaagcaaagtatacttcaagagctgctgacttataccggcagttgctcgctaaggatgttgctaaaaattccactgaagatgggaacaacagttggccgtcctccccagttgcagcttcacaacctacaaatcaagctgatgcaattccagatcttaagctggcagaggcatctaaagaagttgcaaatgagaagactgagcctgaggttattcgttcaccaagggctccaactcattctttcaagaagccaattgttgcgaagaagcctggaaataagaccggtggacttggtgcacggaaacttacgtcaaagccaaatgaaagtctctatgagcagaagcctgaagagctagctcctgcgctgccaccagtgactgagaacagtacagcaaagagcaaatctcatacttcacgatttgaatatgtggaaaatacaccttctgctgggagcaattcagaagaaaaccaggtcattggacatgttgcgcccccaaaatcttcaaacttctttggcgaatttgggatggacagtggatatcacaaaaaatctgcccctggcccatccaaagtgcaggcatgctacactccacacaaagcttttctgctaacaaacaattggctactaatacttattgaagaaagtagtgaagcaagacagaagttttcaaatgcaaagtcaatttcatcttctcagttttttggagaccaggccagttttgaaaaggaggctcaagtttccctccaaaagttttcgggatcttctgccatttcaagtgctgatctatttggtcatccaaccaatagttccaacgtggatctgagtgcttcagatttgatcaaccggctttctttccaggcttcccaggatctgtcttctatcaagaacatggctggggaaactgggaagaagttgacatctttggcatcgaacatcatgtctgatcttcaagaccggatcctgtga

SEQ ID NO: 552 - protein, 426 aa, Oryza sativa
MATDSSSSAAADKNTVFRKLRAKSDNKMCFDCNAKNPTWASVTYGVFLCIDCSAVHRSLGVHVSFVRSTNLDSWTPEQLKMMVYGGNNRAQAFFKQHGWTDGGKIEAKYTSRAADLYRQLLAKDVAKNSTEDGNNSWPSSPVAASQPTNQADAIPDLKLAEASKEVANEKTEPEVIRSPRAPTHSFKKPIVAKKPGNKTGGLGARKLTSKPNESLYEQKPEELAPALPPVTENSTAKSKSHTSRFEYVENTPSAGSNSEENQVIGHVAPPKSSNFFGEFGMDSGYHKKSAPGPSKVQACYTPHKAFLLTNNWLLILIEESSEARQKFSNAKSISSSQFFGDQASFEKEAQVSLQKFSGSSAISSADLFGHPTNSSNVDLSASDLINRLSFQASQDLSSIKNMAGETGKKLTSLASNIMSDLQDRIL

SEQ ID NO: 553 - DNA, 1734 bp, Oryza sativa
atggcaactattgcattctctcgattttctatatgcttttgtgtccttctcctttgccatggttctatggctcagatatttagtctaggcataaatccatggcaaaatcctcgacaagggggttctagggagtgtaggtttgataggctccaagcgtttgagccgcttaggaaagtgaggcatgaagctggggttacagagtactttgatgagaagaatgagcagttccagtgcaccggtacattagtaattcgtcgcattattgagcctcagggccttcttttacctcgatactccaacactcctggcctagtatatatcatccaagggactggtgtactgggattgacctttcctggttgcccagcaacttaccaaaagcaatttaggcattttggtcttgaaggaggaagccaaaggcaaggaaaaaaattaagagatgaaaaccaaaagatccaccaatttaggcaaggagatgttgttgcacttccttctggtataccacactggttctataatgagggtgacacccctgttgttgctttgtttgtttttgatgtaaacaacaatgctaatcaactcgaaccaagacaaaaggagttcttgttagctggtaacaatatagagcaacaagtgtccaacccctcaatcaacaaacattctgggcaaaacatattcaatggattcaacactaagctattaagtgaggccttaggcgttaacatagaggtgaccagaaggctacaaagtcaaaatgaccgaagaggagatatcattcgagtaaagaatggccttcgattgataaaaccaactatcacacaacaacaggaacaaacacaagatcaataccaacaaattcaatatcatagagagcaacgatcaacaagcaaatacaatggcttggatgagaacttctgtgcaattagggcaaggttaaacatagaaaaccctaatcatgctgatacttacaaccctcgtgctggaaggattacaaatctcaatagccagaagttctccattcttaaccttgtccaaatgagtgctacaagagtaaatctataccagaatgctattctctcaccattctggaatattaatgctcacagtttggtgtatacaattcaagggcgtgctcgagttcaggttgttagcaaccatggaaaggctgtatttaatggtgttcttcgtccagggcaattactaattataccacaaaattatgtggttatgaagaaagcagagcttgaaggatttcaatttatcgcgtttaagacaaacccaaatgccatggtaaaccacatcgcggggaagaactcagttctccgtgcaatgcctgtggatgtgatagctaatgcatatcgcatctcaaggcaggaagctcgtagcttgaagaataataggggagaagagattggtgctttcactcctagatatcaacaacaaaaaatccaccaagagtactcaaatccaaacgaaagtgagactcaagagctacacgaaagtcactgccgtatgaagctcccaccgtcgcacaaagctggctcgcgtggatcccgggcaccgcggctgttgtcgttgctgttccgcccatccggcgaagcccttgccgccgtcgccgtcgtcgtgcgatgctaccgccccttcagatctagcttcccgcaaagcttccggcgaggctgtcaaatcccatcgtttgctgtggcctaccgaggctgccgattgtttggttcatga

SEQ ID NO: 554 - protein, 577 aa, Oryza sativa
MATIAFSRFSICFCVLLLCHGSMAQIFSLGINPWQNPRQGGSRECRFDRLQAFEPLRKVRHEAGVTEYFDEKNEQFQCTGTLVIRRIIEPQGLLLPRYSNTPGLVYIIQGTGVLGLTFPGCPATYQKQFRHFGLEGGSQRQGKKLRDENQKIHQFRQGDVVALPSGIPHWFYNEGDTPVVALFVFDVNNNANQLEPRQKEFLLAGNNIEQQVSNPSINKHSGQNIFNGFNTKLLSEALGVNIEVTRRLQSQNDRRGDIIRVKNGLRLIKPTITQQQEQTQDQYQQIQYHREQRSTSKYNGLDENFCAIRARLNIENPNHADTYNPRAGRITNLNSQKFSILNLVQMSATRVNLYQNAILSPFWNINAHSLVYTIQGRARVQVVSNHGKAVFNGVLRPGQLLIIPQNYVVMKKAELEGFQFIAFKTNPNAMVNHIAGKNSVLRAMPVDVIANAYRISRQEARSLKNNRGEEIGAFTPRYQQQKIHQEYSNPNESETQELHESHCRMKLPPSHKAGSRGSRAPRLLSLLFRPSGEALAAVAVVVRCYRPFRSSFPQSFRRGCQIPSFAVAYRGCRLFGS

SEQ ID NO: 555 - DNA, 1560 bp, Oryza sativa
atgcagttcagcagtgtgtttcccttagagggtaaagcatgcgtgagcccaataaggagaggtggtgagggctcagctagtgatagattgaagatcggggacagtagcagcatcaagcatgatagagcagtgaggaggatgtgtcttggttataggggcaccaaaaacggtgcacaatgtgtgctcacctcagatgctggcccagacactcttcatgtccgaacatcattccggaggaactttgcggatccaaatgaggttgctgctgttatattgggtggtggcaccgggactcaactttttcctctcacaagcacaagggccacgcctgctgttcctattggaggatgctataggcttatcgatatccccatgagcaactgtttcaacagtggcataaacaagatattcataatgactcaattcaactcagcatctcttaatcgtcacattcatcgtacgtaccttggtggtggaatcaactttactgatggatctgttgaggtattagccgctacacaaatgcctggggaggctgctggttggttccagggtacagcagatgcagttagaaaatttatctgggttcttgaggactattacaagcataaagctatagaacacattttaatcttgtcaggagatcagctttatcgtatggactacatggagcttgtgcagaaacatgttgatgacaatgctgacattactttatcatgtgctcctgttggagagagtcgagcatctgactatggactagtgaagttcgacagttcaggccgtgtaattcaattttctgaaaaacccaagggcactgacttggaagcaatgaaagtggataccagctttctcaattttgccatagacgacccgactaaatttccctacattgcttcgatgggagtttatgtcttcaaaagagatgttcttttaaaccttctaaagtcaagatatgcagaactacatgactttgggtctgaaatcctcccaagagctttacatgagcacaatgtacaggcatatgtcttcgctgactactgggaagacattggaacgatcagatcgttctttgatgcaaacatggccctttgcgagcagcctcccaagtttgagttttatgatccaaaaactcccttcttcacttcacctcgatatttgccgccaacaaagtcagataaatgcaggattaaagatgcgataatttcccatggctgtttcttgcgtgaatgtaccatcgagcattcgatagttggagtccgctcacgccttaactctgcatgtgagctcaagaataccatgatgatgggtgcggatttgtacgaaactgaagatgaaatttcaagactactgtcagaaggcaaggtccccattggtgtaggggaaaacacaaagataaacaactgcatcatcgacatgaacgcgagggttggaaggaacgtggtcatcacaaacagcgagggtgtccaagaaagtgatcggcctgaggaagggtactacataaggtcgggaatcgtggtgatcctgaagaacgcgaccatcaaggacgggaaggtcatatag

SEQ ID NO: 556 - protein, 519 aa, Oryza sativa
MQFSSVFPLEGKACVSPIRRGGEGSASDRLKIGDSSSIKHDRAVRRMCLGYRGTKNGAQCVLTSDAGPDTLHVRTSFRRNFADPNEVAAVILGGGTGTQLFPLTSTRATPAVPIGGCYRLIDIPMSNCFNSGINKIFIMTQFNSASLNRHIHRTYLGGGINFTDGSVEVLAATQMPGEAAGWFQGTADAVRKFIWVLEDYYKHKAIEHILILSGDQLYRMDYMELVQKHVDDNADITLSCAPVGESRASDYGLVKFDSSGRVIQFSEKPKGTDLEAMKVDTSFLNFAIDDPTKFPYIASMGVYVFKRDVLLNLLKSRYAELHDFGSEILPRALHEHNVQAYVFADYWEDIGTIRSFFDANMALCEQPPKFEFYDPKTPFFTSPRYLPPTKSDKCRIKDAIISHGCFLRECTIEHSIVGVRSRLNSACELKNTMMMGADLYETEDEISRLLSEGKVPIGVGENTKINNCIIDMNARVGRNVVITNSEGVQESDRPEEGYYIRSGIVVILKNATIKDGKVI

SEQ ID NO: 557 - DNA, 2154 bp, Oryza sativa
  misc_feature (153)..(153): n = any nucleotide
  misc_feature (206)..(206): n = any nucleotide
  misc_feature (216)..(216): n = any nucleotide
  misc_feature (219)..(219): n = any nucleotide
  misc_feature (221)..(221): n = any nucleotide
  misc_feature (1749)..(1749): n = any nucleotide
atggccggagcgccgtgcctcctgcgcgtgctagccgtctcctcctgcctctgcctcctcgccgacgccgcgcgcctcctggcggcggcgccggcggaggaagccgacgcgctgctcaagctcaaggccggcatcgtggacggcggcggcgcnctggacacctgggccgccggcacgagcccctgcgatggcggcacctcggcgtnggccggcgtngtntncagcaagggcagcgtgctcggcctgcagctggagaaggagggcctgtccggcgagctcgacctcgccccgctcaagagcctcaccggcctccgcacgctcagcttcatggacaacgagttcgccggcgccatgcccgacgtgaagggcctcggcgggctccgcgccatcttcctgtccgggaacaagttctccggcgagatccccgccgacgcgttcgccgggatgggctggctcaagaaggtgtccctgtcgcggaacggcttcaccggcgccatcccggcctcgctcgccgccgtgccgaggctcctcgacctccagctcaacgacaacaagttcacgggcaagatccccgacttcccccagaaggatctcaaggtgttcgacgtctccaacaacgagctggatggggagatcccggcgagcctcaaatcaatcgatccacagatgttcgagggcaacaagaagctctgcggcgcgccagtcgacgcgaaatgcgaggcgccatccccagcggcaacgacgtcgccgccggcggcgacatccggcaagatcgggacctcgccgtctcccacggccgccgccgagacaaccacaacgggcacagtgccagccgaggaggggacgcagggcgcgacgaagcccaccaagggatcgacgtcgttcggcgtcctcgccgcgttcctcggcacgctggccatcatcggcttcgcggtggtcgagctccagaggcggcgagagtacaacacccagaacttcggccctgcagcttcaaccaagcccacattgccatcagctcccgcgtcaccagcaaccaagcccacgcacgccgccgccgccgccaccgccgcagccgccaccaccggaggaggcggcgcgcgaagcagcagcgtgagcgggagcacggcgaggggcggcggcgggaaggcgggggagcaagggcggctgacgttcgtgcgggacgacgacagggggaggttcttcgagctgcaggacctgctgaaggcgtcggcggaggtgctcggcgccgccaacctcggcgtgtgctaccgcgctacgctcaccggcggccactccgtggtggtgaagcggttcaaggagatgaaccgcgtggggaaggaggacttcgaggagcacatgcggcggctcggccgcctctcccaccccaacctcctcccgctcatctcctactactaccgcaaggaggagaagctcctcatccacgactacgtccccaacaagagccttgctcacctcctccacggtgagggtcggagggtgaagaagctggtgcactggccggcgaggctgaagctggtgaagggggtggcgcgagcgctccaatacctgtacgacgagctgccgatgctgacggtgccgcacggccacctcaagtcgtccaacatcctcctcaacgaccgcttcgaaccgctgctcaccgactactcgctggtcccggtgatgaaccagtcgcactcggcgcagctcatggtggccttcaagtcgccggagcggaggcagttcggccgntcctccaagaagagcgacgtctggtgcctcggcatcctcatcctcgagatcctcaccggccggccgccgtcctacgacccgccgccgcagccggaggcggcgacggcgaacggcgacctcgtcggagcggtggcgtcgacgccggagggggagtggctggagaaggtggtggacgcggacatgatcaggaagtgggaggacgaggagagcaagggggagatggtgaagctgatcaagatcgggatggcgtgctgcgaggccgccgtggacagccggtgggagctcaagacggcggtggagagcatcgaggagctcaagggggggaaggaggaggacgccaacgacgagcactccttctactcctcgatcgacggcgacgaattcgccagcgtcgccatcaactaa

SEQ ID NO: 558 - protein, 717 aa, Oryza sativa
MAGAPCLLRVLAVSSCLCLLADAARLLAAAPAEEADALLKLKAGIVDGGGALDTWAAGTSPCDGGTSASAGVVSSKGSVLGLQLEKEGLSGELDLAPLKSLTGLRTLSFMDNEFAGAMPDVKGLGGLRAIFLSGNKFSGEIPADAFAGMGWLKKVSLSRNGFTGAIPASLAAVPRLLDLQLNDNKFTGKIPDFPQKDLKVFDVSNNELDGEIPASLKSIDPQMFEGNKKLCGAPVDAKCEAPSPAATTSPPAATSGKIGTSPSPTAAAETTTTGTVPAEEGTQGATKPTKGSTSFGVLAAFLGTLAIIGFAVVELQRRREYNTQNFGPAASTKPTLPSAPASPATKPTHAAAAATAAAATTGGGGARSSSVSGSTARGGGGKAGEQGRLTFVRDDDRGRFFELQDLLKASAEVLGAANLGVCYRATLTGGHSVVVKRFKEMNRVGKEDFEEHMRRLGRLSHPNLLPLISYYYRKEEKLLIHDYVPNKSLAHLLHGEGRRVKKLVHWPARLKLVKGVARALQYLYDELPMLTVPHGHLKSSNILLNDRFEPLLTDYSLVPVMNQSHSAQLMVAFKSPERRQFGRSSKKSDVWCLGILILEILTGRPPSYDPPPQPEAATANGDLVGAVASTPEGEWLEKVVDADMIRKWEDEESKGEMVKLIKIGMACCEAAVDSRWELKTAVESIEELKGGKEEDANDEHSFYSSIDGDEFASVAIN

SEQ ID NO: 559 - DNA, 2850 bp, Oryza sativa
  misc_feature (497)..(497): n = any nucleotide
  misc_feature (1573)..(1573): n = any nucleotide
  misc_feature (1578)..(1578): n = any nucleotide
  misc_feature (1586)..(1586): n = any nucleotide
  misc_feature (1815)..(1815): n = any nucleotide
  misc_feature (1821)..(1821): n = any nucleotide
atgctcatgcgtcatccgaccatcgccgccgccgccgcctcctccttcctcctcctcatgatcgccgccgatggccaggcggcgacgccgccaccacctgcagccatcggcaactactgcgaaccgcgcgagagagacgcgctgctggcgttcaaggaaggcgtcaccgacgaccctgcaggcctccacgcctcatggcgacgaggtggcggtcagctgcaggaggattgctgccaatggcgaggcgtccggtgcagcaacctcaccggccatgtcgtcaagctccgcctccgcaacgaccacgccggaacagcgctggccggcgagataggccagtctctgatctcgctggagcatctcaggtaccttgatctcagcatgaacaaccttgcaggttccactggacatgtccctgagttcttgggctctttcaaaagcctgagatatctgaatctatctgggatagtgttctccggcatggtgccgcctcagctcgnacacttgtccaatttgcaatatctgaaccttgatggggtaaaccttagcacagtagttgattggtcacatgttctgaacatgatcccttctctgaagattgttagcctttcttcttgctcacttcagagtgcaaaccagtctctcccagagcttagtttcaaggaactcgagaagcttgatctttccaacaatgactttaaccacccagctgaatctagttggatttggaacttgacatctctcaagtatctcaatcttagctcgactagtttgtacggtgatattccgcgagcgctaggaaacatgctgtccctccaagttcttgatttctcatttgatgatcataaagatagcatgcgcatgagcgtgtcgaaaaatggcaatatgggcaccatgaaagcaaacttgaagaatctatgcaatttggaagttctagaccttgattgtaggctagaatatggaaacattacggatatatttcagagtttaccacagtgttcacccagcaaactgaaggaagttcatttggctggcaacactttaaccgggatgctaccaaattggattggaaggctaacaagcttagtcactcttgacctcttcaataatagcattactggacaggtgccttctgaaataggtatgcaaacaaatctgaggaatttgtacctacatttcaataacatgaatggtaccatcacagagaagcactttgcgcacctgacgagcttgaagtcgatatatttgtgttacaatcatttgaacattgtgatggatcctcaatggttacctcccttcaaattagagaagtcttactttgcatctattacgatgggtccctcattttctagatggcttcaatcacaggttgatattgtcgcacttgctatgaatgatgctggcataaatgacacattcccagactggttctctacaacattttcaaaggccaagttgttggaatttcccggtaatcaaatcagtggtggattgccaacaaatatggaaaacatgtcattggaaaaattatatctgaaatcgaaccaaatagcgggtctgattcctcgcatgccgngaaanctcactanattagatttatcaaacaactcattgtcaggacctctgccattaaatattggatctccaaaactagctgagttgaatctgttatccaaccgtatcaccgggaatgttccacaatctatttgtgaactgcagaatttacatggcctagacttatccaacaatctgcttcatggagagtttcctcaatgttctgggatgagcatgatgtcgttttttcgtctgagtaacaanagcttntctggcaacttcccatcttttcttcagggttggacagagttaagcttccttgatctatcatggaataaattctctgggaatttgcctacatggattggaaatttcagcaagctagaaattctgcggcttaagcataacatgttctctggaaatattcctgccagcatcaccaaacttggaaatctttctcatttggatcttgctagcaatagtatatcaggtcccctgcctcagtatttggcaaatttgacaggaatggttccgaagcaatattatacgaacgagcatgaagagagactatctggatgtgactacaaatctcttgtgaccatgaaggggctggaacttgagtatgatgaagaaaatgtaactgtggtgaccattgatttgtcctcaaatctattgaccggtgtgattcctgaagacattacttatcttcatagattgataaatctgaatctatcgagtaactatttgagtggaaaaattccatattcgatcagggacatgcagtcattggaatcgctcgacctctcgaagaacatgctctatggtgaaatcccacaaagtttgtctgatttatcgtctttaagttttctgaacctatcttataacaatctcatgggaagaataccattagggacacaacttggcaccctctatgaccaaaaccatcatctgtatgatggcaatgatggtctttgtgggcctcctctcccaaaaagctgttataaaagcgatgcatcagagcaaggtcacctgatgagaagtaaacaaggttttgacatagggccattttccattggagttgcaatgggatttatggcaggtctctggattgtcttctatgcccttttgttcatgaaaacttggagggttgcttacttctgtctcttggacaaggtgtatgacgaggtttgtgtgattgcggtttttggttgggcaagattgacaggaagaacagatgcgagactgctgatgtcacaggtcgcatggtcatccatcgactccgacgaatcctatgaatag

SEQ ID NO: 560 - protein, 949 aa, Oryza sativa
MLMRHPTIAAAAASSFLLLMIAADGQAATPPPPAAIGNYCEPRERDALLAFKEGVTDDPAGLHASWRRGGGQLQEDCCQWRGVRCSNLTGHVVKLRLRNDHAGTALAGEIGQSLISLEHLRYLDLSMNNLAGSTGHVPEFLGSFKSLRYLNLSGIVFSGMVPPQLAHLSNLQYLNLDGVNLSTVVDWSHVLNMIPSLKIVSLSSCSLQSANQSLPELSFKELEKLDLSNNDFNHPAESSWIWNLTSLKYLNLSSTSLYGDIPRALGNMLSLQVLDFSFDDHKDSMRMSVSKNGNMGTMKANLKNLCNLEVLDLDCRLEYGNITDIFQSLPQCSPSKLKEVHLAGNTLTGMLPNWIGRLTSLVTLDLFNNSITGQVPSEIGMQTNLRNLYLHFNNMNGTITEKHFAHLTSLKSIYLCYNHLNIVMDPQWLPPFKLEKSYFASITMGPSFSRWLQSQVDIVALAMNDAGINDTFPDWFSTTFSKAKLLEFPGNQISGGLPTNMENMSLEKLYLKSNQIAGLIPRMPRNLTTLDLSNNSLSGPLPLNIGSPKLAELNLLSNRITGNVPQSICELQNLHGLDLSNNLLHGEFPQCSGMSMMSFFRLSNNSFSGNFPSFLQGWTELSFLDLSWNKFSGNLPTWIGNFSKLEILRLKHNMFSGNIPASITKLGNLSHLDLASNSISGPLPQYLANLTGMVPKQYYTNEHEERLSGCDYKSLVTMKGLELEYDEENVTVVTIDLSSNLLTGVIPEDITYLHRLINLNLSSNYLSGKIPYSIRDMQSLESLDLSKNMLYGEIPQSLSDLSSLSFLNLSYNNLMGRIPLGTQLGTLYDQNHHLYDGNDGLCGPPLPKSCYKSDASEQGHLMRSKQGFDIGPFSIGVAMGFMAGLWIVFYALLFMKTWRVAYFCLLDKVYDEVCVIAVFGWARLTGRTDARLLMSQVAWSSIDSDESYE

SEQ ID NO: 561 - DNA, 1890 bp, Oryza sativa
atggagggcgggaagccgacggtcatcaccaacgccgagggccagcggacgacgccctccgtggtggcgtacaccaagggcggggagcggctggtcgggcagatcgccaagcggcaggccgtcgtcaacccggagaacaccttcttctccgtcaagcgcttcatcggccgcaagatggccgaggtcgacgacgaggccaagcaggtctcctaccacgtcgtccgcgacgacaacggcaacgtcaagctcgactgccccgccatcggcaagcagttcgccgccgaggagatttccgcgcagctctcaacttcgatttctatgtcagtcttgaggaagttggtggacgatgcatctaagtttttgaatgacaaaattaccaaagcagtggttactgttcctgcatacttcaatgactcacagaggacagcaacaaaagatgctggacgtattgcaggattggaagttctccgcattataaatgagccgactgctgcatcccttgcttatggttttgagaagaaaaacaacgaaacgattcttgtgtttgacttgggaggcggtacctttgatgtctctgtattggaggttggagatggtgtgtttgaggtgctttccacatctggtgacacacaccttggtggcgatgacttcgataagaaagttgtggattggcttgctagcaactttaagaaagatgaaggcattgatcttctgaaagacaaacaagccctgcagcgactcactgaggcagcagagaaagcgaagatggaactgtctacgctgtctcagacaaacattagcttgcctttcataactgctactgctgatgggcctaaacacatcgagacaactctctccagagccaaatttgaggagctatgttcggacctcattgataggcttaaaactcctgtcactaatgccttgagagatgccaaactgtctgttgataacctggacgaagtgattcttgttggtggatccactcgtatcccttccgtgcaagagcttgtgaagaagatcactggcaaggatcccaatgtcacagtcaaccctgatgaggttgtttctcttggggcagctgtacagggtggagttttggccggagatgtgaaagatgtcgttcttcttgatgttactccattgtctcttggtctggagacgttgggtggagtgatgaccaagattattcccagaaacacaacactgcccacctcaaaatcagaggtattctccacagctgcagatggacagacaagtgttgagataaatgttcttcagggagagagagagtttgtccgggacaacaagtctcttggaagcttccgcttggatggaatccctcctgcaccacgtggtgttccacaaattgaagtcaagtttgatattgatgccaatggtattctctctgttgctgctattgataagggtactgggaagaaacaggatatcaccatcaccggcgctagtacactgccaaaggatgaggttgagagaatggtggaagaggctgacaagtttgctcaggaggacaaagagaaaagagatgccattgataccaaaaaccaggcagactctgtggtctaccagactgagaagcaactgaaggagctaggtgacaaggtacctgcacctgtgaaagagaaggtggatgcaaagctcaacgagctcaaagaggccattgcgggtggatcaacacagagcatgaaggatgccatggctgctttaaacgaggaagttatgcagatcggccaggccatgtacaaccagcagcctaatgctggtgctgctggacctactcctggtgccgatgctggaccgacaagctcaggcggtaagggaccgaatgatggagatgttattgatgcggatttcactgacagcaattga

SEQ ID NO: 562 - protein, 629 aa, Oryza sativa
MEGGKPTVITNAEGQRTTPSVVAYTKGGERLVGQIAKRQAVVNPENTFFSVKRFIGRKMAEVDDEAKQVSYHVVRDDNGNVKLDCPAIGKQFAAEEISAQLSTSISMSVLRKLVDDASKFLNDKITKAVVTVPAYFNDSQRTATKDAGRIAGLEVLRIINEPTAASLAYGFEKKNNETILVFDLGGGTFDVSVLEVGDGVFEVLSTSGDTHLGGDDFDKKVVDWLASNFKKDEGIDLLKDKQALQRLTEAAEKAKMELSTLSQTNISLPFITATADGPKHIETTLSRAKFEELCSDLIDRLKTPVTNALRDAKLSVDNLDEVILVGGSTRIPSVQELVKKITGKDPNVTVNPDEVVSLGAAVQGGVLAGDVKDVVLLDVTPLSLGLETLGGVMTKIIPRNTTLPTSKSEVFSTAADGQTSVEINVLQGEREFVRDNKSLGSFRLDGIPPAPRGVPQIEVKFDIDANGILSVAAIDKGTGKKQDITITGASTLPKDEVERMVEEADKFAQEDKEKRDAIDTKNQADSVVYQTEKQLKELGDKVPAPVKEKVDAKLNELKEAIAGGSTQSMKDAMAALNEEVMQIGQAMYNQQPNAGAAGPTPGADAGPTSSGGKGPNDGDVIDADFTDSN

SEQ ID NO: 563 - DNA, 2148 bp, Oryza sativa
  misc_feature (222)..(222): n = any nucleotide
  misc_feature (228)..(228): n = any nucleotide
  misc_feature (265)..(265): n = any nucleotide
  misc_feature (267)..(267): n = any nucleotide
  misc_feature (282)..(282): n = any nucleotide
  misc_feature (348)..(348): n = any nucleotide
atgaacccgctccctcccccggccagccggctgtgggaggcgagcatccgcaagctcaagtactccaccatcctccgcggctccgtcgtcccctccggcgccgccttcgatggtgcggcggcggcggccaccggaggtgaccccgtcacgctcaccccaagcctctccgtcagctcctccacctccaacaccatctaccagtacgaagacggcgacgacganatcgantccgtcctcgacgacgtcgacaccgacgacgacgacntngacgaggcgtccctnggcgagcccagccattccgaccagctgctgcccagcggagacttctaccagggcgactgcgcggcnacttccccacggcgccggcaagtatctctggacggacggcagcatttctcgtggtcgtcgggcgccatctacgagggcgacctcgccggcgggtacatgcacggccaaggaacctacatcggcgagctcggggacacgttcgccgggctgtgggcgaacaacctccggcacggccgcggcacgcaggcgtacgtcaacggcgacgtgtacgacggccactggcgcgacgggctgcaggatgggcacggccggtacatctggcgcggcggccacgagtacatcgggacgtggaaggccggcgagatgcacggccgcgggacggtgatatgggcggacggcgaccggtacgacggcgcgtgggaggacgccaagcccaaggggcagggcacgttccggtggtccgacggcgggatgtacatcggcctgtggtgccaggagtccggcgagacgcagggcaagggcgtgtactacccgccgtccggtggcccggcggtgccgttgccccgggaacccaaggaggtgatcacgaagctgctcgaggagctggagatgtccgaggggaagacggtgtcgctgctgccgtcgcagaaggtgctgacatggcccggggtggagcccgtgacgaagaagccggtgtggcggccgccggaggtcgccgctgaccaagggatgtggcggccgccggaggtcggagctgaccaagggaggaggtcgagcaggaggaacagcatgtcgtccgacattgacagcctggttgagggggaggacggcggcgaggagactcgcaacgacaggtcatgggtgcggacaccgtcgtgtatgcgcgcgcccacgctgccgaagccggggaagaagcagggggagaccatctccaagggccacaagaactacgaactgatgctcaacttgcagctgggtatcaggactttgcgcaagctctttgatgttgacccaggagactacatgctctccatttgcggggatgatgcactgctggagctttcatctcccggtaaaagtggaagtttcttttatttcaccaatgatgacaagtacatgatcaaaacaatgaagaaagcagaagttaaagtacttctgaggatgcttccagcctattataaacatgttcgatcttttgataatactctagtaacaaaattttttggcctgcattgtgttaaaattacaggagctattcagaaaaaggttcggtttgttataatggggaatcttttctgctccaactattcaatccacagacgctttgatttgaaaggatcatcacatggtcgcacaacggacaaacccctcgatcaaattgatgagactaccactttgaaggaccttgatctaaatttcattttccggttagagggatcatggtatgaagatttctgcaggagatgcattttaagtcatgggcctgaaaatacttttttcttggttacagacagcagcagtcctgacaacgagacaactcaaactgctcttgaagatgaggaaaaaagaaaagcaccagtcaagctagggattggcatgccctcaagggtggagaatgttgtgaagaatcctgaaagcgaatcccagctcattggcgaaccaacaggggaattccaggacgttatcctgttctttggaatcattgatatcctacaagactatgatatcagcaagaagcttgagcatgcctacaaatccatgcaatatgatcccaactccatatcggctgttgatccaaagcaatactgcaaaaggttcagggacttcatttacagggcttttagtgaagacgtacagtaa

SEQ ID NO: 564 - protein, 715 aa, Oryza sativa
MNPLPPPASRLWEASIRKLKYSTILRGSVVPSGAAFDGAAAAATGGDPVTLTPSLSVSSSTSNTIYQYEDGDDEIDSVLDDVDTDDDDLDEASLGEPSHSDQLLPSGDFYQGDCAATSPRRRQVSLDGRQHFSWSSGAIYEGDLAGGYMHGQGTYIGELGDTFAGLWANNLRHGRGTQAYVNGDVYDGHWRDGLQDGHGRYIWRGGHEYIGTWKAGEMHGRGTVIWADGDRYDGAWEDAKPKGQGTFRWSDGGMYIGLWCQESGETQGKGVYYPPSGGPAVPLPREPKEVITKLLEELEMSEGKTVSLLPSQKVLTWPGVEPVTKKPVWRPPEVAADQGMWRPPEVGADQGRRSSRRNSMSSDIDSLVEGEDGGEETRNDRSWVRTPSCMRAPTLPKPGKKQGETISKGHKNYELMLNLQLGIRTLRKLFDVDPGDYMLSICGDDALLELSSPGKSGSFFYFTNDDKYMIKTMKKAEVKVLLRMLPAYYKHVRSFDNTLVTKFFGLHCVKITGAIQKKVRFVIMGNLFCSNYSIHRRFDLKGSSHGRTTDKPLDQIDETTTLKDLDLNFIFRLEGSWYEDFCRRCILSHGPENTFFLVTDSSSPDNETTQTALEDEEKRKAPVKLGIGMPSRVENVVKNPESESQLIGEPTGEFQDVILFFGIIDILQDYDISKKLEHAYKSMQYDPNSISAVDPKQYCKRFRDFIYRAFSEDVQ

SEQ ID NO: 565 - DNA, 633 bp, Oryza sativa
atggcgagcccgcagtgctgcgcgaacccaccgacgctgaacccggccggcggggaggggaaggtggtggagagcttcggcgggatcaaggcgtacgtcgccggcgccgcggagtccaaggccgccgtcgtcctcatctccgatgtcttcgggtttgaagcgccgaacctgaggaagatagccgacaaagttgcctcgtctggatactttgttgtggtgccagatttcttacatggggatcctttagtacctgaaagtactgagaaaccgtttcaaatgtggataaaagaacatggcccggacaaagcatttgaagaggcgaaaccaattattgccgctctgaaggagaaaggagtgtctagtattggggctgtaggttattgctggggtgaggtcaaatgcccaattgctatacttggagctgaaattgatcgtatgtccccaccagaagtggtgaagcagttcgagcaggttctttcttcaaagtcagggattggccactttgtcaagatcttccctggggttgaacatggatggactgtgagatacaagaatgatgatgcagctgctgtcaagagcgccgaggaagccctggcggacatgattgactggtttaataagaacctgaagtga

SEQ ID NO: 566 - protein, 210 aa, Oryza sativa
MASPQCCANPPTLNPAGGEGKVVESFGGIKAYVAGAAESKAAVVLISDVFGFEAPNLRKIADKVASSGYFVVVPDFLHGDPLVPESTEKPFQMWIKEHGPDKAFEEAKPIIAALKEKGVSSIGAVGYCWGEVKCPIAILGAEIDRMSPPEVVKQFEQVLSSKSGIGHFVKIFPGVEHGWTVRYKNDDAAAVKSAEEALADMIDWFNKNLK

SEQ ID NO: 567 - DNA, 1101 bp, Oryza sativa
  misc_feature (171)..(171): n = any nucleotide
  misc_feature (821)..(821): n = any nucleotide
atgccgagcagcggcggcgccatgcctgcccttccaccaggcttccgcttccaccccaccgacgaggagctcatcgttcactacctcatgaaccaggccgcctccatcaagtgccccgtgccaatcatcgccgaggtcaacatctacaagtgcaacccatgggaccttccnggtaaggctttgttcggcgagaacgaatggtacttcttcagcccgagggaccgcaagtaccccaacggcgctcgccccaaccgcgccgccggctcggggtactggaaggccaccggcaccgacaagtccatcctctccactccgaccagcgacaacatcggcgtcaagaaggccctcgtcttctacaagggcaagcctcccaagggcgtcaagaccgactggatcatgcacgagtaccgtctcaccggcacatcagctaacagcaccaccaccacaaagcagcgtagagcgtcatccatgaccatgaggctggacgactgggtgctgtgcagaatccacaagaagagcaacgacttcaattcctctgaccaacacgaccaagaacccgaggaatcaaccgtcgaacagcttgaagacatccatgacaacaactcctctgaacaacctccagctccagctgacatgaacaaccaacagtcagatttccagcccatgacggcgatgagcatgagcaagtcatgctccctcaccgatctcctcaacaccatcgactgcgccgcgctctcgcagtttctcctcgacggctcatccgacgccatcgctgagcctcctgctcctcccagccccctaatatacacaacacctcatcnaaattaccaaacactaaactataacattaacagcaacagcagcatgccacacgccttcgagtcacgcctagatcatcacgatggttacgttaacaattataatgttaatggcctgaggaggaagagaatgatggcgtgtagtgcaacttcctttgatgatggcagcagcagcagcaatgactttgtgcatgccgacaaaccagctgcttcatcaactaatctctacgactccaaccaaaatgacaaattaatggtcgtcttgtccacaattcagtactga

SEQ ID NO: 568 - protein, 366 aa, Oryza sativa
  misc_feature (57)..(57): Xaa = any naturally occuring amino acid
  misc_feature (274)..(274): Xaa = any naturally occuring amino acid
MPSSGGAMPALPPGFRFHPTDEELIVHYLMNQAASIKCPVPIIAEVNIYKCNPWDLXGKALFGENEWYFFSPRDRKYPNGARPNRAAGSGYWKATGTDKSILSTPTSDNIGVKKALVFYKGKPPKGVKTDWIMHEYRLTGTSANSTTTTKQRRASSMTMRLDDWVLCRIHKKSNDFNSSDQHDQEPEESTVEQLEDIHDNNSSEQPPAPADMNNQQSDFQPMTAMSMSKSCSLTDLLNTIDCAALSQFLLDGSSDAIAEPPAPPSPLIYTTPHXNYQTLNYNINSNSSMPHAFESRLDHHDGYVNNYNVNGLRRKRMMACSATSFDDGSSSSNDFVHADKPAASSTNLYDSNQNDKLMVVLSTIQY

SEQ ID NO: 569 - DNA, 6237 bp, Oryza sativa
  misc_feature (323)..(323): n = any nucleotide
  misc_feature (418)..(418): n = any nucleotide
  misc_feature (2540)..(2540): n = any nucleotide
  misc_feature (2583)..(2583): n = any nucleotide
  misc_feature (2589)..(2589): n = any nucleotide
  misc_feature (2595)..(2595): n = any nucleotide
  misc_feature (4083)..(4083): n = any nucleotide
atgtcccactgcctccgggcgtcgcccttcctctccccgccgcctcccctcctccacccgtcccgccgccgccgccaccgccagggaggctgcatccacacctccccggggacgaggcccctcgtcgcgcgcgcccgcttcgacccgccgccgctgctccgcctcaaggtctccgactccagcgactgccccgcgccgcaccacccgcactcgcagcaccagccgctgctcccgacgcggcggcagcagcagcagccgccgccgccgtaccaggccctcgtcgcctcccttgcgccgctatggcggaaagggctcttcctcgngcgctgctccgtcttcgcggcggcgctctccgttgccgccgcgctctcctggtacgcgcagctccgcgcccgctccttcgtcgagtctcgcctcntccccgccgcgtgcgccgccctgggggaattcctccagcgggaggtccacctcggcagggtgcgcagcgtctccccgctcgggatcaccctccacacctgctccatcggcccgcacgcggaggagttctcctgcgccgaggtgcccgtcatgaagatcagggtcaggccattcgccagcctcaggcgggggagggtcgtcgtcgacgccgtgctgtccgagccctcggcgctcgtggcccagaggaaggatttctcatggctggggctccccgcgccatccgagggctcacccaagaggcattcgggggaggaggggatcgattaccgcaccaaaacgaggcggctcgcgagggagaaggccgccgagcagtggaatgaggagagggataaggctgcaagggaagccgccgaaatgggatacattgttcctagtgcccaatcgatttcgccttcgatcgatgagatgatggaagacgatggacctgttgatactgggaaatccagcccacacctatgtcctgatgaaatgcacaggaaggaccatcacattgatgcgggcattgactccagctcgaaacatgccgatttggagaaatcgttcggcgtgaaagctcgtattccagggatcagcttctggtctaggatgattccaaaccctagcaggcgcaggtacaggaggaaggctcatagcaagttgatatcggacactgacaattcttctcagcaaaggatccttaggcgtagcgcatatgctgctgttgcatattttcaaaacgagtgtagtggtaatcctgatgactctttgcctggtcctggtgaaagctcatctgatggaggtcatacaaatggtggtggtgaggaaggtagtccaaatgatggaccaactgaatactctgagacaacatctatggattatggtgaattaccgccagagaaaagcaatttcgctagtacaatgctgattggcaatacggatgtcttgaatggaagttctcataatcaacaacctagtcagattagttcacactcttgggaaaataatgagcaagtatctgaagcccctgttttgaagaaacgtaaaaatatatccgaagatgattaccggcaagaattcgattttggggcttttggttcatgcacatatgctcacaactggctatcattttggcccttccaattgaaggggtttcctgtcgggttcaatgcaccatcagcttctctgaatgttcagatccagaagttgaggtcattgtttgctattggtccaggagacaattctgccgaactttcacaaggtgttggccagatccatcctggtgctgttcaacaaactcttcccatcaccctggattctgtatatttcaatggagggaatctgatgcttctaggatatggtgaccaagaaccaagggaaatgaaacatgctaatggacacatcaagttcaaaaacagttataatcgtgtacatgtgcatgtcactgggaactgcatggagtggaggcaagaccggacttctcaaggagggggttatctttctactgatgtttttgttgatatagctgagcaaacatggcatgctaatttgaatgtagtcaatgcttttgctccgctgtttgagcggatcctcgaaataccagttgtttggaataaagggagagctactggcgaggtgcatctctgtatgtcgaagggtgatagtttcccgagcattcatggccagcttgatgtgaagggcctagcttttcagattttagatgctccatcatcgttttcagatatagtggcaactctatcttttcgtggtcaaagagtatttctacataatgcaagtggttggtttggtgatgctccggtagaagcttctggtgattttggtctaaatcctgaggatggagagtttcatctaatgtgccaggttccatcagttgaagttaatgcacttatgaaaacaatgaaaatgcgacccttaatgtttccgttggctggtgctgttactgccgtatttaactgtcaagggcctcttgatgctcctgtttttgttggaagtgggattgtctcaaggaagtctctttcagtatctggtatgcttccatcggcagcctctgaagctgtgatgcaaancaaagagtctggtgcagtggccgctttggatcatatccccttnactcangtttcngcaaatttcactttcaaccttgataactgcgttgctgatttatatggcattagagcatgccttttggatggtggagaaattcgaggagctggtaatgtttggatttgcccagagggggaaggtgatgattctgctatggatattaatttgtctgggagcattttacttgacaaagttttgcatcgctacattcctggaggcatccagttgattccactcaaaattggagagctcaatggagagactagactttctggttcccttattaggccgaaatttgatatcaaatgggctgcaccaaatgcagaagattctttttctgatgcgcgtggcaatattgttattgcacatgactatattatggtcaactcatcatcagtttcttttgatttgaatactcatattcaaacatcatatattgatgattatttgctgcataaggagatgtatcaaaggaaaaaaattatgccactgattgtggagggtgtggatttggatttacgcatgaggggctttgagtttgctcatatagcttcttcgataccttttgattcaccacggcctctacatttgaaagcatctggaaggtttaaatttcaaggaaaagtggtgaaatatagccagttagttgatgagaagaaccatggtgctatacaaggtaccattgaccaaagtaagcttgagaacgatgtatcaaggcttgttggcgagatttctctgtcaggaattaaacttaaccaacttatgctggcaccacaatctactggttttctttccatatcaccagattctataatggttcgaaatttgccacttgatgagctggagtttgcttcattacgtgggtttgttcagaaggcagaactccagcttaatttccagaaaagaagaggtcatggtttgctgtcagttatccgcccaaaatttagtggcatgcttggggaatcacttgatatagctgctcgatggagtggtgatgttattactatggaaaaatcagtcctagagcaagctaatagcaagtatgaacttcaaggggagtatgtttttcctggaacacgtgatagattccctatggaaagtcagagtaatggtttcatagagaaagcgatgggagggcatcttggtagcatgatgtcttcgatgggcaggtggaggatgagattagaagtacctggtgctgaagtagctgaaatgcttccgttggcaagacttctatcacgaagtacagacccagctattcgttccagatcaaaggaactttttatgcaaactttgcattctgttggattcaatgctgaaagtcttcgtgaccagctaaaggcattagaaatgtatcctgattggttggatgatgatacaattgaggatataactcttcctggcttagctgaactgagaggttattggcgtggttctcttgatgccagtggtggagggaacggcgatactatggctgattttgatttcaatggtgaagattgggantggggcacttacaagacacagcgtgttctggcatctggttcattcagcaataatgatggcctgcgtcttgataagttatttattcagaaggataatgccactcttcatgctgatggatcaattcttggcccattaacaaatcttcactttgctgtgcttaatttcccagttggtcttatacccgcattagttcaggctatagaatcatcaaccacagactcgattcattttctgaggcaatggttgacaccaatcaaaggcattctacatatggagggagatttgagaggtactctagcaaagcctgaatgtgatgttcaaataagacttcttgatggcaccattggaggcattgatctcggaagagctgaagtattagcttctgtaaccccaacaagccgttttgtttttgatgcaaacttcgaaccgaccatacaaagtgggcacgttaacattcaaggtagtgttcctgttacttatgtagacagcaactccattgaggaagacctggaagggggagatggtaaacaaggtataataagaatccctgtttgggcgaaagacagaggcttgacaaatgacatcagcgaaacaagaatcatgagagacaagcctgatgagggttgggagtttcaattagctgaaagcctaaagggtttaagctggaatatgctagaaccaggcgaagtgagaataaatgcagatataaaggatgggggtatgacactgataactgcactgagtccttactcaaactggcttcaaggctatgctgaagttcttctccaggttaaaggcactgttgatcaccctgttgttgatgggtctgcctcatttcaccgtgcaaccgtggcttctcctttccttcggacaccactgacaaatttcgctggcaatgttcatgttatatctaacagactatgtatcagttccatggaaagcagagttgggaggaaagggagattgtcaatgaaagggactctacctctccacaatattgagccatcagccaatgacaagattgaactgaaatgcgaagttctggacatacgagcaaaaaatattttgagtggccaagtagacagccagctgcaggttacaggctcaatattgcggccagatgtctctggaatgattcggctaagccatggtgaagcgtatttgcctcatgataaaggcaatggtgctgttgccaccaggctgtcttcaaataaatccatctctgttcctgctggttttgaccaaagaacagtctcacgagatgtctcccactttctaggatcactatcaactagtccagacggccaacaatcagaaactgaaaggactcctgaacatggaagttttaagccaaacattgatgcccgactcaatgatctgaagctcacatttggacctgaattaaggattgtttatcctttaattttgaattttgctgtgagtggcgaccttgagcttaatggcatggttcatccgaagtacataagacctaagggtgtcttaacttttgaaaatggtgaggtcaatttggttgctactcaggtaagacttaaaaatgatcatttgaatgtagcaaagtttgagccagatcttggtttggatcctattctggatcttgttcttgttggatctgagtggcaatttaagatccaaagtcgagcaagcatgtggcaagacaatcttgttgtaacctccacacgctctgtggaccaggatgttctttcacctagtgaggctgcaaaggtttttgagtcacagcttgcggagtcactattggaaggtgatggacagctcgcgttcaagaaactcgcaactgcaacactcgaaactttgatgccaaggattgaaggcaagggtgaatttggtcaagcacggtggcgactggtttatgcaccgcagattccgagtttactatctgtagatccaacggttgacccacttaaatcgctggcaaacaatatatcttttgctactgaggtcgaagtgcaacttggaaaacgccttcaggcctctgttgtcaggcagatgaaagattcagaaatggcaatgcagtggtcactcatatatcagctaaccagcaggctccgtgttctcttccaatctacgccgtccaatcgacttctcttcgagtactctgcaacatcccagggttga

SEQ ID NO: 570 - protein, 2078 aa, Oryza sativa
MSHCLRASPFLSPPPPLLHPSRRRRHRQGGCIHTSPGTRPLVARARFDPPPLLRLKVSDSSDCPAPHHPHSQHQPLLPTRRQQQQPPPPYQALVASLAPLWRKGLFLARCSVFAAALSVAAALSWYAQLRARSFVESRLLPAACAALGEFLQREVHLGRVRSVSPLGITLHTCSIGPHAEEFSCAEVPVMKIRVRPFASLRRGRVVVDAVLSEPSALVAQRKDFSWLGLPAPSEGSPKRHSGEEGIDYRTKTRRLAREKAAEQWNEERDKAAREAAEMGYIVPSAQSISPSIDEMMEDDGPVDTGKSSPHLCPDEMHRKDHHIDAGIDSSSKHADLEKSFGVKARIPGISFWSRMIPNPSRRRYRRKAHSKLISDTDNSSQQRILRRSAYAAVAYFQNECSGNPDDSLPGPGESSSDGGHTNGGGEEGSPNDGPTEYSETTSMDYGELPPEKSNFASTMLIGNTDVLNGSSHNQQPSQISSHSWENNEQVSEAPVLKKRKNISEDDYRQEFDFGAFGSCTYAHNWLSFWPFQLKGFPVGFNAPSASLNVQIQKLRSLFAIGPGDNSAELSQGVGQIHPGAVQQTLPITLDSVYFNGGNLMLLGYGDQEPREMKHANGHIKFKNSYNRVHVHVTGNCMEWRQDRTSQGGGYLSTDVFVDIAEQTWHANLNVVNAFAPLFERILEIPVVWNKGRATGEVHLCMSKGDSFPSIHGQLDVKGLAFQILDAPSSFSDIVATLSFRGQRVFLHNASGWFGDAPVEASGDFGLNPEDGEFHLMCQVPSVEVNALMKTMKMRPLMFPLAGAVTAVFNCQGPLDAPVFVGSGIVSRKSLSVSGMLPSAASEAVMQNKESGAVAALDHIPLTHVSANFTFNLDNCVADLYGIRACLLDGGEIRGAGNVWICPEGEGDDSAMDINLSGSILLDKVLHRYIPGGIQLIPLKIGELNGETRLSGSLIRPKFDIKWAAPNAEDSFSDARGNIVIAHDYIMVNSSSVSFDLNTHIQTSYIDDYLLHKEMYQRKKIMPLIVEGVDLDLRMRGFEFAHIASSIPFDSPRPLHLKASGRFKFQGKVVKYSQLVDEKNHGAIQGTIDQSKLENDVSRLVGEISLSGIKLNQLMLAPQSTGFLSISPDSIMVRNLPLDELEFASLRGFVQKAELQLNFQKRRGHGLLSVIRPKFSGMLGESLDIAARWSGDVITMEKSVLEQANSKYELQGEYVFPGTRDRFPMESQSNGFIEKAMGGHLGSMMSSMGRWRMRLEVPGAEVAEMLPLARLLSRSTDPAIRSRSKELFMQTLHSVGFNAESLRDQLKALEMYPDWLDDDTIEDITLPGLAELRGYWRGSLDASGGGNGDTMADFDFNGEDWDWGTYKTQRVLASGSFSNNDGLRLDKLFIQKDNATLHADGSILGPLTNLHFAVLNFPVGLIPALVQAIESSTTDSIHFLRQWLTPIKGILHMEGDLRGTLAKPECDVQIRLLDGTIGGIDLGRAEVLASVTPTSRFVFDANFEPTIQSGHVNIQGSVPVTYVDSNSIEEDLEGGDGKQGIIRIPVWAKDRGLTNDISETRIMRDKPDEGWEFQLAESLKGLSWNMLEPGEVRINADIKDGGMTLITALSPYSNWLQGYAEVLLQVKGTVDHPVVDGSASFHRATVASPFLRTPLTNFAGNVHVISNRLCISSMESRVGRKGRLSMKGTLPLHNIEPSANDKIELKCEVLDIRAKNILSGQVDSQLQVTGSILRPDVSGMIRLSHGEAYLPHDKGNGAVATRLSSNKSISVPAGFDQRTVSRDVSHFLGSLSTSPDGQQSETERTPEHGSFKPNIDARLNDLKLTFGPELRIVYPLILNFAVSGDLELNGMVHPKYIRPKGVLTFENGEVNLVATQVRLKNDHLNVAKFEPDLGLDPILDLVLVGSEWQFKIQSRASMWQDNLVVTSTRSVDQDVLSPSEAAKVFESQLAESLLEGDGQLAFKKLATATLETLMPRIEGKGEFGQARWRLVYAPQIPSLLSVDPTVDPLKSLANNISFATEVEVQLGKRLQASVVRQMKDSEMAMQWSLIYQLTSRLRVLFQSTPSNRLLFEYSATSQG

SEQ ID NO: 571 - DNA, 501 bp, Oryza sativa; identical to SEQ ID NO: 99

SEQ ID NO: 572 - protein, 166 aa, Oryza sativa; identical to SEQ ID NO: 100

SEQ ID NO: 573 - DNA, 1287 bp, Oryza sativa
atggcgagcaaacgcttcttgtccctgtccctgctcatcctcctcctcggcttctcctccagcttggcagccgggcaagtcctgtttcagggcttcaactgggagtcgtggaaggagaatggcgggtggtacaacatgctgatgggcaaggtggacgacatcgccgccgccggcatcacccacgtctggctccctccgccgtctcaatctgtcgccgaacaaggctacatgccggggcggctgtacgatctggacgcttccaagtacggcaacgaggcgcagctcaagtcgctgatcgaggcgttccacggcaagggcgtccaggtgatcgccgacatcgtcatcaaccaccgcacggcggagcacaaggacggccgcggcatctactgcctcttcgagggcgggacgcccgactcccgcctcgactggggcccgcacatgatctgccgcggcgacccctacggcgacggcaccggcaacccggacaccggcgccgacttcggcgccgcgcctgacatcgaccacctcaacaagcgcgtccagcgcgagctcatcggctggctcgactggctcaagatggacatcggcttcgacgcgtggcgcctcgacttcgccaagggctactccgccgacgtggcaaagatctacatcgacgccaccgagccgagcttcgccgtggccgagatatggacgtcgctggcgtacggcggggacggcaagccggactatgaccagaacgcgcaccggcaggagctggtcaactgggtcgaccgcgtcggcggcgccaacagcaacgccacgacgttcgacttcaccaccaagggcatcctcaacgtcgccgtggagggcgagctatggcgcctccgcggcgaggacggcaaggcgcccggcatgatcgggtggtggccggctaaggcgacgaccttcatcgacaaccatgacaccggctcgacgcagcacatgtggccgttcccctccgacaaggtcatgcagggctacgcctacatcctcacccaccccggcaacccatgcatcttctacgaccatttcttcgactggggccacaaggaggagatcgagcgcctggtatcgatcagaaaccggcaggggatccacccggcgagcgagctgcgtatcatggaggctgacagcgatctctacctcgccgagatcgacggaaaggtcatcacgaaggtcggaccaagatacgacgtcgagcacctcatccccgaaggcttccaggtcgtcgcgcacggtgacggctacgcagtctgggagaaaatctga

SEQ ID NO: 574 - protein, 428 aa, Oryza sativa
MASKRFLSLSLLILLLGFSSSLAAGQVLFQGFNWESWKENGGWYNMLMGKVDDIAAAGITHVWLPPPSQSVAEQGYMPGRLYDLDASKYGNEAQLKSLIEAFHGKGVQVIADIVINHRTAEHKDGRGIYCLFEGGTPDSRLDWGPHMICRGDPYGDGTGNPDTGADFGAAPDIDHLNKRVQRELIGWLDWLKMDIGFDAWRLDFAKGYSADVAKIYIDATEPSFAVAEIWTSLAYGGDGKPDYDQNAHRQELVNWVDRVGGANSNATTFDFTTKGILNVAVEGELWRLRGEDGKAPGMIGWWPAKATTFIDNHDTGSTQHMWPFPSDKVMQGYAYILTHPGNPCIFYDHFFDWGHKEEIERLVSIRNRQGIHPASELRIMEADSDLYLAEIDGKVITKVGPRYDVEHLIPEGFQVVAHGDGYAVWEKI

SEQ ID NO: 575 - DNA, 474 bp, Oryza sativa; identical to SEQ ID NO: 95

SEQ ID NO: 576 - protein, 157 aa, Oryza sativa; identical to SEQ ID NO: 96

SEQ ID NO: 577 - DNA, 1326 bp, Oryza sativa
atggcaaagcgcatagcctcaatgagcagcctcctccttatcgccttgctctgtctgagctctcacttggcccaagcccaggtcctcttccaggggttcaactgggagtcgtggaagaagcagggcgggtggtacaacttcctccatggccacgtcgacgacatcgccgcgaccggtgtcacgcacgtctggctcccaccgccgtcgcactccgtcgccccgcagggatacatgccgggccggctctacgacctggacgcttccaagtacggcacgggggcagagctcaggtcgctgatcgccgccttccacagcaaaggcatcaagtgcgtcgccgacatcgtcatcaaccaccggtgcgcggattacaaggatagccgtggcatctactgcattttcgagggtggcacgccggacagccgcctcgactggggccccgacatgatctgcagcgacgacacgcagtactccaacggccgcggtcaccgagacaccggcgcagacttcggcgcggcgcccgacatcgaccacctcaacacgcgtgtgcagacagagctgtccgactggctcaattggctcaagtccgacgtcggcttcgacggctggcgcctcgacttcgccaagggatactcggcggccgtcgccaagacgtacgtcgacaacaccgacccgtccttcgtcgtcgccgagatatggagcaacatgcgttacgacggcaacggtgagccgtcgtggaaccaggacggtgaccggcaggagctggtgaactgggcgcaggccgtcggtggccctgcgtcagcgttcgacttcacgaccaagggcgagctgcaggcggcggtgcaaggtgagctgtggcggatgaaggacggcaacggcaaggcgccggggatgattggctggctgccagagaaggccgtcaccttcatcgacaaccatgacactggctccacacagaactcatggccgttcccctccgacaaggtcatgcagggctacgcctacatcctcacacaccctggagtaccctgcattttctacgaccatgtatttgactggaacctgaagcaggagatcagcacattagctgcagtgagatcaagaaatgagattcatcccgggagcaagctgaaaatccttgctgctgagggagacgtctatgtcgccatgatcgatgataaggtcataacaaagattgggacacggaatagaaaaagaagcatccacgttcgctctcatggtctaaaaattctcacattaatcggagaaaaagaaaaggcagagtccatatcgaaatacaatttagaaatagctgaaattcggaattaa

SEQ ID NO: 578 - protein, 441 aa, Oryza sativa
MAKRIASMSSLLLIALLCLSSHLAQAQVLFQGFNWESWKKQGGWYNFLHGHVDDIAATGVTHVWLPPPSHSVAPQGYMPGRLYDLDASKYGTGAELRSLIAAFHSKGIKCVADIVINHRCADYKDSRGIYCIFEGGTPDSRLDWGPDMICSDDTQYSNGRGHRDTGADFGAAPDIDHLNTRVQTELSDWLNWLKSDVGFDGWRLDFAKGYSAAVAKTYVDNTDPSFVVAEIWSNMRYDGNGEPSWNQDGDRQELVNWAQAVGGPASAFDFTTKGELQAAVQGELWRMKDGNGKAPGMIGWLPEKAVTFIDNHDTGSTQNSWPFPSDKVMQGYAYILTHPGVPCIFYDHVFDWNLKQEISTLAAVRSRNEIHPGSKLKILAAEGDVYVAMIDDKVITKIGTRNRKRSIHVRSHGLKILTLIGEKEKAESISKYNLEIAEIRN

SEQ ID NO: 579 - DNA, 1500 bp, Oryza sativa
atggcatccataaatcgccccatagttttcttcacagtttgcttgttcctcttgtgcaatggctctctagcccagcagctattaggccagagcactagtcaatggcagagttctcgtcgtggaagtccaagagaatgcaggttcgataggttgcaagcatttgagccaattcggagtgtgaggtctcaagctggcacaactgagttcttcgatgtctctaatgagcaatttcaatgtaccggagtatctgttgtccgtcgagttattgaacctagaggccttctactaccccattacactaatggtgcatctctagtatatatcatccaagggagaggtataacagggccaactttcccaggctgtcctgagtcctaccaacaacagttccaacaatcaggccaagcccaattgaccgaaagtcaaagccaaagtcaaaagttcaaggatgaacatcaaaagatccaccgtttcagacaaggagatgtaattgcattgcctgctggtgtagctcattggtgctacaatgatggtgaagtgccagttgttgccatatatgtcactgatctcaacaacggtgctaatcaacttgaccctaggcaaagggatttcttgttagctggaaataagagaaaccctcaagcatacaggcgtgaggttgaggagcggtcacagaacatatttagtggctttagcactgaactacttagcgaggctcttggcgtaagcagccaagtggcaaggcagctccaatgtcaaaatgaccaaagaggagaaattgtccgtgtcgaacacgggctcagtttgctgcagccatatgcatcattgcaggagcaggaacaaggacaagtgcaatcaagagagcgttatcaagaaggacaatatcagcaaagtcaatatggaagtggctgctctaacggtttggatgagaccttttgcaccctgagggtaaggcaaaacatcgataatcctaaccgtgctgatacatacaatccaagagctggaagggttacaaatctcaacacccagaatttccccattcttagtcttgtacagatgagtgcagtcaaagtaaatctataccagaatgcactcctttcaccattttggaacatcaacgctcacagcgtcgtgtatattactcaaggccgtgcccgggttcaagttgtcaacaacaatggaaagacagtgttcaacggcgagcttcgccgcggacagctgcttattataccacaacactatgcagttgtaaagaaggcacaaagagaaggatgtgcttacattgcattcaagaccaatcctaactctatggtaagccacattgcaggaaagagttccatcttccgtgctctcccaaatgatgttctagcaaatgcatatcgcatctcaagagaagaggctcagaggctcaagcataatagaggagatgagttcggtgcattcactccaatccaatacaagagctaccaagacgtttataatgcggcagaatcctcttag

SEQ ID NO: 580 - protein, 499 aa, Oryza sativa
MASINRPIVFFTVCLFLLCNGSLAQQLLGQSTSQWQSSRRGSPRECRFDRLQAFEPIRSVRSQAGTTEFFDVSNEQFQCTGVSVVRRVIEPRGLLLPHYTNGASLVYIIQGRGITGPTFPGCPESYQQQFQQSGQAQLTESQSQSQKFKDEHQKIHRFRQGDVIALPAGVAHWCYNDGEVPVVAIYVTDLNNGANQLDPRQRDFLLAGNKRNPQAYRREVEERSQNIFSGFSTELLSEALGVSSQVARQLQCQNDQRGEIVRVEHGLSLLQPYASLQEQEQGQVQSRERYQEGQYQQSQYGSGCSNGLDETFCTLRVRQNIDNPNRADTYNPRAGRVTNLNTQNFPILSLVQMSAVKVNLYQNALLSPFWNINAHSVVYITQGRARVQVVNNNGKTVFNGELRRGQLLIIPQHYAVVKKAQREGCAYIAFKTNPNSMVSHIAGKSSIFRALPNDVLANAYRISREEAQRLKHNRGDEFGAFTPIQYKSYQDVYNAAESS

SEQ ID NO: 581 - DNA, 1431 bp, Oryza sativa
atgccccccgacgtcgaggtcattcgccacgaacacatcgatcatccatcatctacaagagatcgatcagtagtggttagcagcaactcactatcgaacacggtttcagcttacacagatatgaagaacaccagcagcttgtgtttgctgctcctcgtggtgctctgcagcttgacctgtaactcgggtcaagcacaggtcctcttccagggtttcaactgggagtcgtggaagcagcagggtggctggtacaacatgttgaaaggccaagtcgacgacatcgccaaggccggggtcacccacgtctggctgccgccgccgtcgcactccgtggcgccgcaggggtacatgccggggcgtctctacgacctggacgcgtccaagtacggcacggcggcggagctcaagtcgctgatcgcggcgttccacgggaagggcgtccagtgcgtcgccgacgtcgtgatcaaccaccggtgcgccgagaagaaggacgcccgcggcgtgtactgcgtgttcgagggcgggacgcccgacgaccgcctcgactggggccccggcatgatctgcagcgacgacacgcagtactccgacggcacgggccaccgcgacaccggcgaggggttcggcgcggcgcccgacatcgaccacctcaacccgcgcgtccagcgggagctcaccgactggctcaactggctcaagtccgacgtcggcttcgacggctggcgcctcgacttcgccaagggatactccacggacatcgctaagatgtacgtcgagagctgcaagccgggcttcgtcgtcgccgagatatggaactcgctgagctacaacggcgacggcaagccggcggccaaccaggaccagggccggcaggagctggtgaactgggtgaacgccgtcggcgggccggcgatgacgttcgacttcaccaccaagggcctcctgcaggcgggcgtccagggcgagctgtggcggctgcgcgacggcaacggcaaggccgccggcatgatcgggtggctgccagagaaggccgtcacgttcgtcgacaaccacgacaccggctcgacgcagaagctttggccgttcccctccgacaaggtcatgcagggctacgcctacatcctcacccaccccggagtcccctgcatcttctacgaccacatgttcgactggaacctgaagcaggagataaccgcgctggcggcgatcagggagaggaacggcatcaacgccgggagcaagctccggatcgtcgtcgccgacgccgacgcatacgtcgccgtcgtcgacgagaaggtcatggtgaagatcgggacgaggtacgacgtgggcaacgcggtgccgtcggatttccatcagacggtgcacggcaaggactacagcgtctgggagaaggggtccctccgcgtcccggcggggcggcacctatag

SEQ ID NO: 582 - protein, 476 aa, Oryza sativa
MPPDVEVIRHEHIDHPSSTRDRSVVVSSNSLSNTVSAYTDMKNTSSLCLLLLVVLCSLTCNSGQAQVLFQGFNWESWKQQGGWYNMLKGQVDDIAKAGVTHVWLPPPSHSVAPQGYMPGRLYDLDASKYGTAAELKSLIAAFHGKGVQCVADVVINHRCAEKKDARGVYCVFEGGTPDDRLDWGPGMICSDDTQYSDGTGHRDTGEGFGAAPDIDHLNPRVQRELTDWLNWLKSDVGFDGWRLDFAKGYSTDIAKMYVESCKPGFVVAEIWNSLSYNGDGKPAANQDQGRQELVNWVNAVGGPAMTFDFTTKGLLQAGVQGELWRLRDGNGKAAGMIGWLPEKAVTFVDNHDTGSTQKLWPFPSDKVMQGYAYILTHPGVPCIFYDHMFDWNLKQEITALAAIRERNGINAGSKLRIVVADADAYVAVVDEKVMVKIGTRYDVGNAVPSDFHQTVHGKDYSVWEKGSLRVPAGRHL

SEQ ID NO: 583 - DNA, 1500 bp, Oryza sativa; identical to SEQ ID NO: 401

SEQ ID NO: 584 - protein, 499 aa, Oryza sativa; identical to SEQ ID NO: 402

SEQ ID NO: 585 - DNA, 489 bp, Oryza sativa
atggcggcgccggatgttgagtaccgctgcttcgtcggcggcctcgcctgggccaccgacgaccgctccctcgaagccgccttctccaccttcggcgagatcctcgagtccaagatcatcaacgatcgggagacggggaggtcgcgcgggttcgggttcgtgacgttctcgagcgagcaggccatgcgcgacgccatcgaggggatgaacggcaaggagctcgacggccgcaacatcaccgtcaacgaggcccagtcgcgccgctccggaggcggaggcggaggcggctacggccagcgcggcggaggcggaggctacggtggcggcggcggctacggtggtggcggcggcggtggctacggccagcgccgtgaaggcggctacggcggtggcggcggctacggtggcggccgtggcggcggcggcggctacggcggtggctacggcagccgcggcggcggcaactccgacgggaactggaggaactga

SEQ ID NO: 586 - protein, 162 aa, Oryza sativa
MAAPDVEYRCFVGGLAWATDDRSLEAAFSTFGEILESKIINDRETGRSRGFGFVTFSSEQAMRDAIEGMNGKELDGRNITVNEAQSRRSGGGGGGGYGQRGGGGGYGGGGGYGGGGGGGYGQRREGGYGGGGGYGGGRGGGGGYGGGYGSRGGGNSDGNWRN

SEQ ID NO: 587 - DNA, 1689 bp, Oryza sativa
  misc_feature (193)..(193): n = any nucleotide
  misc_feature (196)..(196): n = any nucleotide
atggcggcggcggcggtggcggcgaacggcggcggcgacggcgcgcaggcgtccaacgcgcccgcccccaccaggctcgcgtcggtctacagcgaggtgcagaccagccgcctcaagcacgcgctccccctcccctccgtcctccgctcccccttcgccctcgccgacggccccgccagcttccgccgccggnaancccgtcccgagcccgactcttctgtggatctcgccctcctcctgcttggtgagatcgcgaagctgttccccaacctgttcggccagccgtccgtgtcgctggtgccgtcgccggagccggcgtccaccaggccgctcaaggtcggcgtcgtgctctccggcggtcaggcgcccggcggccacaatgtcatctgcggcatcttcgattacctgcaggaatatgcaaaaggatccgtcatgtatggattcaagggaggtccagctggagtcatgaagtgcaagtacgttgagctcactgcggattatgtgtacccctacagaaaccagggtggatttgatatgatctgcagtggtagggacaagattgaaacaccagagcagttcaagcaagctgaagacactgtaaacaaacttgatttggatgggcttgttgtcattggtggtgatgattcaaacacaaacgcatgccttcttgctgagtacttcagggggaagaacatgaaaactcgtgtcattggttgcccaaagactattgatggagatctgaaatgcaaggaggttccaacaagctttgggtttgacactgcttgcaagatatactctgaaatgattggtaatgttatgactgatgcacgctcaaccgggaagtactaccactttgtgaggcttatgggacgtgctgcttctcacattacattggagtgtgctctgcaaacacatcctaatgttgcactcattggagaagaggttgctgcaaagaaggaaactcttaaaagtgtcaccgactacattaccgacattgtctgcaagcgtgcagaacttggttacaactatggtgtgatccttatcccagagggtctgattgatttcatcccagaggggctttggaaaagcaagcttcaaccagaatccaggcaactgtttgacttcctgcccaaaaccatccaggagcaacttttgcttgaaagagatcctcatggaaatgttcaggttgcaaaaattgaaacagagaaaatgcttattgccatggttgagactgaattggagaagagaaaagctgaggggaagtaccccgcacatttcagaggccaatctcacttctttggatatgaaggaagatgtggccttcctactatttttgattctaactattgctatgcgttaggctacggttctggggcacttctccaatgtgggaagacaggactgattacgtcggttggcaacctcgctgctcctgtggaagaatggaccgttggtggaactgcattgacatcgttgatggatgttgagaggaggcacggaaagtacaagccagtgatcaagaaggctatggtggaacttgacggggcaccgtttaagaagtttgcttcattgcgagatgagtggtccctcaagaaccattacatcagccctggtcccatccagttcagtggccctggaagcaacgatgcgaaccacaccttgatgttggaactcggcgccgaggcatag

SEQ ID NO: 588 - protein, 562 aa, Oryza sativa
  misc_feature (65)..(66): Xaa = any naturally occuring amino acid
MAAAAVAANGGGDGAQASNAPAPTRLASVYSEVQTSRLKHALPLPSVLRSPFALADGPASFRRRXXRPEPDSSVDLALLLLGEIAKLFPNLFGQPSVSLVPSPEPASTRPLKVGVVLSGGQAPGGHNVICGIFDYLQEYAKGSVMYGFKGGPAGVMKCKYVELTADYVYPYRNQGGFDMICSGRDKIETPEQFKQAEDTVNKLDLDGLVVIGGDDSNTNACLLAEYFRGKNMKTRVIGCPKTIDGDLKCKEVPTSFGFDTACKIYSEMIGNVMTDARSTGKYYHFVRLMGRAASHITLECALQTHPNVALIGEEVAAKKETLKSVTDYITDIVCKRAELGYNYGVILIPEGLIDFIPEGLWKSKLQPESRQLFDFLPKTIQEQLLLERDPHGNVQVAKIETEKMLIAMVETELEKRKAEGKYPAHFRGQSHFFGYEGRCGLPTIFDSNYCYALGYGSGALLQCGKTGLITSVGNLAAPVEEWTVGGTALTSLMDVERRHGKYKPVIKKAMVELDGAPFKKFASLRDEWSLKNHYISPGPIQFSGPGSNDANHTLMLELGAEA

SEQ ID NO: 589 - DNA, 1449 bp, Oryza sativa
atgactcaggagaaagcactgaggaagaggtgctttggtgatggagttactggaactgcacgatgtgtgttcacatcagatgctgatagagacactcctcatcttcggacacaatcctcccgaaagaattatgctgatgcaagccacgtttctgctgtcattttgggtggaggcactggagttcaactctttcctctgacaagcacaagggctacccccgctgttcctgttggaggatgttacaggcttattgacatccctatgagcaattgcttcaatagcggaataaataaaatatttgtgatgactcagttcaattctgcttctcttaatcgccatatccatcatacataccttggtggggggatcaactttactgatgggtctgtgcaggtattggctgctacacaaatgcctgacgaaccggctggatggttccagggtacagcagatgctatcagaaaatttatgtggatacttgaggatcattacaatcaaaacaacattgagcacgttgtaatcttgtgtggagatcagctttacaggatgaattacatggagcttgtgcagaaacatgtcgatgacaatgctgacattaccatatcatgtgctcccatcgacgggagccgagcttctgactatggactggtgaagtttgatgattcaggccgtgtgatccaatttcttgagaaaccagagggtgctgatttggaatcgatgaaagttgataccagcttcctcagctatgcaatagatgacaaacaaaagtatccctacattgcatcaatgggaatttatgtcttgaaaaaggatgttcttttagacattctgaagtcaaaatatgcacacctgcaagactttggatcagaaattctcccgagagctgttttagagcataatgtgaaggcatgtgtcttcacagaatattgggaggatattggaacaatcaaatcattttttgatgctaacttggccctcaccgagcagcctccaaagttcgaattttatgatccaaaaactcctttcttcacctcacctcgatacttacctccagcaagattggagaagtgcaagatcaaagatgcaataatctccgatggctgttcctttagtgaatgcaccattgagcattctgtcattggaatctcttcacgcgttagcatcgggtgtgaactcaaggataccatgatgatgggtgcagatcaatatgaaactgaagaagaaacttcaaagctattgtttgaaggcaaggtcccaattggtataggcgagaacacaaagataaggaactgtatcatcgacatgaatgctagaattggcaggaacgtgatcattgcaaacactcagggggtccaagagtctgatcaccctgaagagggatactacataaggtctggaattgtggtgatcctgaagaatgcaaccatcaaggacgggaccgtcatataa

SEQ ID NO: 590 - protein, 482 aa, Oryza sativa
MTQEKALRKRCFGDGVTGTARCVFTSDADRDTPHLRTQSSRKNYADASHVSAVILGGGTGVQLFPLTSTRATPAVPVGGCYRLIDIPMSNCFNSGINKIFVMTQFNSASLNRHIHHTYLGGGINFTDGSVQVLAATQMPDEPAGWFQGTADAIRKFMWILEDHYNQNNIEHVVILCGDQLYRMNYMELVQKHVDDNADITISCAPIDGSRASDYGLVKFDDSGRVIQFLEKPEGADLESMKVDTSFLSYAIDDKQKYPYIASMGIYVLKKDVLLDILKSKYAHLQDFGSEILPRAVLEHNVKACVFTEYWEDIGTIKSFFDANLALTEQPPKFEFYDPKTPFFTSPRYLPPARLEKCKIKDAIISDGCSFSECTIEHSVIGISSRVSIGCELKDTMMMGADQYETEEETSKLLFEGKVPIGIGENTKIRNCIIDMNARIGRNVIIANTQGVQESDHPEEGYYIRSGIVVILKNATIKDGTVI

SEQ ID NO: 591 - DNA, 1593 bp, Oryza sativa
  misc_feature (414)..(414): n = any nucleotide
atggcgatggcggcagccatgggcgtggcctccccctaccacgccgcccacgccgccgcatccacatcgtgcgactcgctccgcctcctcgtcgcggaaggccggccgcggcggccgcgaggggtggcctcctcctcctcctcctcctcttcggcggggaggcggaggcggccgctcgtcttctccccgcgcgcggtgtccgactccaagagctcgcagacctgcctcgacccggacgccagcacgagtgtgcttggaatcattcttggaggtggtgcagggactagattgtatcccctcaccaagaagcgtgccaagcctgccgtgcctctgggtgccaactacaggcttattgatatccctgtcagcaactgtttgaacagcaacatatccaagatctatgtgctgacacanttcaactctgcctctctgaaccgtcacctgtcaagagcctatgggaacaacattggcgggtacaagaatgaagggttcgttgaagtcctcgctgcacagcagagcccagataatcctaactggtttcagggtactgcagatgctgtaagacagtacttatggctatttgaggagcataatgttatggagtttctaattctggctggagatcacctttaccgcatggactatgaaaagttcattcaggcacacagagaaacagattctgatattactgttgctgccctgccaatggatgagaaacgtgcaactgcattcggcctcatgaaaattgacgaggaagggagaatagttgaatttgcagagaaaccaaaaggagaacaattgaaagcaatgatggttgacactaccatacttggccttgacgacgtgagggcaaaagaaatgccttatattgctagcatgggtatctatgtgattagtaaaaatgtaatgcttcagctcctccgtgaacaatttcctggagctaatgactttggaagtgaagtcattccaggtgcaacaaacatcggaatgagggtcatgtgctatatttgctgcttaagaatctatttttgttgtctgcaggtacaagcttacttgtatgatggttactgggaagacattggtaccattgaggcattctataatgcaaatctgggaataacgaaaaagcctgtaccagatttcagtttctatgaccggtctgctccaatttatacacaacctcgacacttgcctccttcgaaggttcttgatgctgatgtgacagacagtgtcattggtgaaggttgtgttattaaaaactgtaagatacaccattcagtagttggactccggtcctgcatttctgaaggcgcaataatagaggactcattactcatgggagctgactactacgagactgaagcagacaagaaactccttggtgaaaaaggtggcattcccattggtattgggaagaattgccacattagaagggcaatcatcgacaagaatgctcgtattggagataatgtgaagataatcaatgttgacaatgtccaagaagctgcaagagagactgatggatactttatcaaaagtggcattgttaccgtgatcaaggatgctttgctccctagcggaacagttatatga

SEQ ID NO: 592 - protein, 530 aa, Oryza sativa; identical to SEQ ID NO: 142

SEQ ID NO: 593 - DNA, 1476 bp, Oryza sativa
  misc_feature (461)..(461): n = any nucleotide
  misc_feature (573)..(573): n = any nucleotide
  misc_feature (591)..(591): n = any nucleotide
  misc_feature (909)..(909): n = any nucleotide
atggcgaagtcatcgtctctcgtgacgaaggttttggtgcagcggcggcggcgcgttcaccgttctcgccgttctcccaccaagccggagcgcgctgccgccgccgacacgttcggttccctcgcgggttgtccctcgtcgccggagtatccggtggtgccggacttggacgactgcgtcgtcgacaccgccgtggatgacgctcccgtggtggcggcggaggcggcaggccgacgcgcgtcggacgagacgctggcggtgcacgccggggagaagctcgggagcggcgccgctgagacggactcgatcgcgacgccgatcgtgagcggcacgacgcactggttcagggactcggcggacctcatcgccttccgggaaggctggcggcggagcttcgagtacgggcggtacggaaacccgacggtgaaggtgctggaggagaagatcagcgcgctggaganggcggaggcgacgctggtgacctcctccggcatgaacgccatcgtcgccacgctgctcgccctcgtcccccccggcggccacgtcgtcgtcaccgccgactgctacagcgangcccgcgccttcatccangacaagctatccaagatgggcatcaccgcatggctttacttgcaatctgattctaacaatggcgttcgttccatggatttgcagtcgacgttcgtggatcttgacgacgacatggaggcgctggaatccgttcttgatgaggacgaggtgacgatgttctacgccgactcgatgacgaacccacacctgaaggtcgtcgacgtggcacgcgtggcggagctgtgccaccggaggggcgcgctggtgtgcatcgacagcacgctggcgtcgcccatcaaccagaagccgctcgccctcggagccgacgtggtcctccantccgccaccaagtacatcgccggccaccatgacgtcatcgccggctgtgtcagcggctcagaggccctcatctcgaggatacgcgcgtggcaccacgacctcggcggcgccatcagtccgaacgcggcgtacatgatcattcggggattgaagacgttggcgctgcgggtggaggcgcagaacaggacggcgctgcggatggcgcggctgctggagaagcaccccaagatcgagcgcgtctactaccctgggctggagagcagcccgtggcacggcgtcgcgacgaggcagatggccggcgccggcggcgtggtcagcttcgaggtggcgtcggacatgcgcggcgtgatgaggttcgtggacgcgctggagttgccgctcatcgcgacgtcgctcggcggctgcgagagccttgtccagcagccggccgtcatgtcctactggggtaagagtgaggaggagaaggcgaagaatgggatcaaggacaactttgtgaggttcagttttgggatcgagaagtttgaggatctcagggatgatatactccaagccctagagaagatttaa

SEQ ID NO: 594 - protein, 491 aa, Oryza sativa
MAKSSSLVTKVLVQRRRRVHRSRRSPTKPERAAAADTFGSLAGCPSSPEYPVVPDLDDCVVDTAVDDAPVVAAEAAGRRASDETLAVHAGEKLGSGAAETDSIATPIVSGTTHWFRDSADLIAFREGWRRSFEYGRYGNPTVKVLEEKISALETAEATLVTSSGMNAIVATLLALVPPGGHVVVTADCYSDARAFIHDKLSKMGITAWLYLQSDSNNGVRSMDLQSTFVDLDDDMEALESVLDEDEVTMFYADSMTNPHLKVVDVARVAELCHRRGALVCIDSTLASPINQKPLALGADVVLHSATKYIAGHHDVIAGCVSGSEALISRIRAWHHDLGGAISPNAAYMIIRGLKTLALRVEAQNRTALRMARLLEKHPKIERVYYPGLESSPWHGVATRQMAGAGGVVSFEVASDMRGVMRFVDALELPLIATSLGGCESLVQQPAVMSYWGKSEEEKAKNGIKDNFVRFSFGIEKFEDLRDDILQALEKI

SEQ ID NO: 595 - DNA, 990 bp, Oryza sativa
  misc_feature (702)..(702): n = any nucleotide
atgggaatctcgaagagtttcttcgtcgcttcgctttctctgctcctcgcggttctcgcgtccaccggcgagggaagccaccagccggtcgtaatgccggtggcgatggagctgtctgccaagtactacaggaagacgtgccccaacgtgcagaacgccgtgcgcacggtgatggagcacaggctggacatggcgccggccgtcctccgcctcttcttccacgactgcttcgtcaacggttgtgacgcctctgttcttctgaaccggacggacaccatggagagcgagaaggacgccgagccggccaacacctcgctcgccgggttcgacgtcatcgacgagatcaagtcggtgctggagcacgactgcccggccaccgtctcctgcgccgacatcctcgcgctcgcctcccgcgacgccgtcgccctcctcggcgggccgagatggagcgtgccgctcggccgcatggactcgcggcaagccagcaaagcggtcgccgaggacgccaacaacctcccgaacccgaacagcgatctcggcgagctcctcagggtgttcgagacgcacggcctcgacgcccgcgacttcaccgcgctctccggcgcgcacaccgtcggcaaggcccacagctgcgacaactacagggaccgcgtctatggcgaccacaatatcgacccctcattcgccgcgctccgccggcgntcgtgcgagcagggcagaggcgaggcgccgttcgacgagcagacgccgatgaggttcgacaacaaatactaccaggacctgctccatcggcgcgggctcctcacctccgaccaggagctctacacccatggcggggaggtaactagtgagcttgtggagctgtacgcgaagagccgtaaggcgttcttcgcggacttcgcgagggcgatggtgaagatgggggagatacgcccgccggagtggattccggtggaggtgaggctcaactgcgggatggtcaacaattga

SEQ ID NO: 596 - protein, 329 aa, Oryza sativa; identical to SEQ ID NO: 6

SEQ ID NO: 597 - DNA, 795 bp, Oryza sativa
  misc_feature (149)..(149): n = any nucleotide
atggggaggacgccgtgctgcgacagggaggcggtgaagaggggcccgtggtcgccggaggaggacgacgcgctgcgcgactacatcaaccgccacggcaccgccggcaactggatctccctccccaacaaggccgggtttaggaggtncggcaagagctgcaggctgcggtggctcaactacctccgccccgacatccgccatggcgccttcaccgacgaggaggacgccatcatcacctccctctactccaagctcggcagcaagtggtcgaccatcgcggcgcagctggagaggaggacggacaacgacgtcaagaaccactggaacaccaagctcaagcgccgcctcgccgccgccgccgcctgcacgcccttactgccgctcccggcgccgccgcccctcgccgccacgcacacgtcgccgtcgtcgtcgctgctgctcctcccgccgctcgccgtaccgaccgtcaagaccgaggcgtacacctgcgacgacttcctgcagcagctgctgccgaccgccaccgccgccacggcgctccgggatcccttcgccgacggcgccgccacggacggcggctcgacgtccgcctccgccgcgtcgtcggggtccaactggtcggcggacaccggcgtcgtcgtcgtcggtggcggcggcggcggcgggctgttcccggaattctgcatgagctccgacgacctcgccggcgccgccacggcggaggacgaccacttcatcggcggcggctactactaccctctcgatccgagcttgtcatcatcactagtgtag

SEQ ID NO: 598 - protein, 264 aa, Oryza sativa
  misc_feature (50)..(50): Xaa = any naturally occuring amino acid
MGRTPCCDREAVKRGPWSPEEDDALRDYINRHGTAGNWISLPNKAGFRRXGKSCRLRWLNYLRPDIRHGAFTDEEDAIITSLYSKLGSKWSTIAAQLERRTDNDVKNHWNTKLKRRLAAAAACTPLLPLPAPPPLAATHTSPSSSLLLLPPLAVPTVKTEAYTCDDFLQQLLPTATAATALRDPFADGAATDGGSTSASAASSGSNWSADTGVVVVGGGGGGGLFPEFCMSSDDLAGAATAEDDHFIGGGYYYPLDPSLSSSLV

SEQ ID NO: 599 - DNA, 972 bp, Oryza sativa
  misc_feature (332)..(332): n = any nucleotide
  misc_feature (348)..(348): n = any nucleotide
  misc_feature (372)..(372): n = any nucleotide
  misc_feature (387)..(387): n = any nucleotide
  misc_feature (429)..(429): n = any nucleotide
  misc_feature (434)..(434): n = any nucleotide
  misc_feature (448)..(448): n = any nucleotide
  misc_feature (450)..(450): n = any nucleotide
  misc_feature (462)..(462): n = any nucleotide
  misc_feature (465)..(465): n = any nucleotide
  misc_feature (519)..(519): n = any nucleotide
atggggtgcgtgtcgtccaagatcctgagcaaatcagggagcttccaggagaaggtggtgagccatggattcaaggggagcaacctgatcgaggagatcatcctgtccacccccaagaagagcaacggcgatcagttcttggccctcctccgcacgtccacctcgtcggcgtcggcggcggcgagcagggccaaggacgccgccgatcagagcaccacggcggcggcggtggccgccgaggagtttgtcaagatcgagacgatcaacgtgtccgagctgctcgccgggctggaggaggaagaggaggaagaagaacgcgacgacggcaaaangttttcggctcaggcntgcgtgctcgatggccccgttgcnacgccggcaagggcnacgagctttcgcaccgtggaggatttcgacgcgctggtaacncggancggctcgtcggagntngcggaggcagcntcntccgccgatcaagacgcgacgggcgccaaaccgtcggagcaagaggaggccgcnaccgccgccgccgggaacaagaggcgggcgagggcgaggcagctcggcgagctgaaggtgccactgccaccggcgttcgacttctccaagtccggcagcctgcgcgactggctcctccagggcggacagatattctccccgggctcctacgtcacccccaagttcgggacgacctcaccggcgccttcgccgccgccgccgcaagaacgtggaggagtactccacaacgccggcgagccgcagccgcagcacaccgtgtttgatcccgagctggtcgcgcagttcgagcaagccatggagcggctgtccgaggacgaggagcgcgtcttggagaagatcctggaagccatgggagcggcggcggaggaggaggaggaggaggaagcgacggcgacggcgacggcgaggctggagatgccaagccatcggccggtgatggtggtgcaggagtag

SEQ ID NO: 600 - protein, 323 aa, Oryza sativa
MGCVSSKILSKSGSFQEKVVSHGFKGSNLIEEIILSTPKKSNGDQFLALLRTSTSSASAAASRAKDAADQSTTAAAVAAEEFVKIETINVSELLAGLEEEEEEEERDDGKRFSAQACVLDGPVATPARATSFRTVEDFDALVTRSGSSEFAEAASSADQDATGAKPSEQEEAATAAAGNKRRARARQLGELKVPLPPAFDFSKSGSLRDWLLQGGQIFSPGSYVTPKFGTTSPAPSPPPPQERGGVLHNAGEPQPQHTVFDPELVAQFEQAMERLSEDEERVLEKILEAMGAAAEEEEEEEATATATARLEMPSHRPVMVVQE

SEQ ID NO: 601 - DNA, 2334 bp, Oryza sativa; identical to SEQ ID NO: 123

SEQ ID NO: 602 - protein, 777 aa, Oryza sativa; identical to SEQ ID NO: 124

SEQ ID NO: 603 - DNA, 1104 bp, Oryza sativa
atggatggggttgtcgccgcttcggctgatgccaccagggacgagattaagattatgaatgtgtacatatgggacatggatgaaaccctcattctgctcaagtcgctgctggatggctcgtatgctggtgcctttgatggcctcaaggaccatgataagagtgttgatatagggaagaggtgggagaatctcattctggaactctgtgacgagcatttcttctatgaggagattgagaattacaatgaaccctttctcagtgctgtcaaagaatatgatgatgggaaagacttgacaacatatgattttgaagctgactgctttagttcgccttatgatgatctgaataaaaggaagcttgcttacaggcaccgtgctattggagagaagtatacaaagggtttggaaaaaattctggaccaccacatgatcaaagtctggaatgatctgtatagcgcgaccgacaaatacaccgatggttggctttcttcagcacttatgtggcataatcagatgcttatgtggtataatcgggtgcttatgcggcttaagctgtacaaggttggggcatccgttccttgtatgcggccttctcataagttgttggaagaagcaatgggtaaatcaacagctgagtccactgccaaacattcaagcatcaattgcatagttacatcagggtccctgattccaagtcttgccaaatgtttgctctatcgtctggatgatgtggttgcattcgagaatgtttacagctcctgggaagtcgggaaactgcagtgcttcaaatggatcaaggagcgctatgatggcccaaacgtccgtttctgtgcaatcggagacggacacgaagaatgcaccgctgcgcagataatgaagtggccatttgtcaagatcgagttccaccctgatgcccctcataggttccctggcctgaaccttccaaccattcatcgcatcatggataccgtttatgattcatcgagcaacgatgtcctccgatgccggcatttgccaattgccgtggagaccttgttaaaggaaattgtaagcagagagatgcgatgggaaggcatattgctgaccctctgcctggagaattag

SEQ ID NO: 604 - protein, 367 aa, Oryza sativa
MDGVVAASADATRDEIKIMNVYIWDMDETLILLKSLLDGSYAGAFDGLKDHDKSVDIGKRWENLILELCDEHFFYEEIENYNEPFLSAVKEYDDGKDLTTYDFEADCFSSPYDDLNKRKLAYRHRAIGEKYTKGLEKILDHHMIKVWNDLYSATDKYTDGWLSSALMWHNQMLMWYNRVLMRLKLYKVGASVPCMRPSHKLLEEAMGKSTAESTAKHSSINCIVTSGSLIPSLAKCLLYRLDDVVAFENVYSSWEVGKLQCFKWIKERYDGPNVRFCAIGDGHEECTAAQIMKWPFVKIEFHPDAPHRFPGLNLPTIHRIMDTVYDSSSNDVLRCRHLPIAVETLLKEIVSREMRWEGILLTLCLEN

SEQ ID NO: 605 - DNA, 1449 bp, Oryza sativa
  misc_feature (1313)..(1313): n = any nucleotide
atggctcaccggctgctgcgagacgcgcaggcggacgggtgggagcggtccgacttccccatcatctgcgagtcctgcctcggcgacaacccctacgtccgcatgttgagagcagaatatgataaagagtgcaaaatatgtgcacgtccgtttactgtcttccgttggcgacctggccgggatgcaagatacaagaagacagagatctgccagacatgttgcaaactgaaaaatgtctgccaggtctgcctgctagatcttgaatatggtctaccggtccaggttagggatacagcactcgctattaattcaaatgatgcaatcccaaggagtgatgtgaaccgtgagtactttgcagaagagcatgatcgcaaggccagggctggaatagattatgattcttcccatgggaaggcacgtcccaatgacaccattctgaagcttcagaggacggcaccatattacaagaggaatcgagctcatgtctgcagtttctatgtgcgtggtgaatgtacaagaggtgctgaatgcccttatcgacatgagatgcctgaaactggagagttatctcagcagaacattaaagatcgttactatggagttaatgatccagttgctttgaaacttttgggtaaggccggtgagatgccatccctgacacctccagacgatgagagtataaggacactttacattggtggccttaataatcgaatcaccgagcaggatttgagggatcaattttacgcacatggtgaaattgagtccataaggatggttctgcaacgtgcctgtgcatttgtgacgtacactacaagagaaggtgctgagaaagctgcagaggagcttgccaacaagttagtcatcaagggtatacgcctgaagctcatgtggggtaagcctcaagcaccaaagccagaagacgatgaagctggaaggcaagggcatgttgcacatggaggaatgctccccagggctgttatatctcagcagcagagtggtgaccagcctcaaccacctggaatggagggacaacagcaagcaccatcgggatcatactacttcaacattccagcaccgccaggagcagagcggacactgtacccttcaatggatccccagaggatgggtgccttggtcaagtcacaggagggtgatggcaaacccggtccacagcaggcagcccaagctcaggcatcaagcagctcaggacagagttaccctatgccaccacaatattaccatggtcagtacccaccctactacccaccgtatggcggttacatgcccccacctggcatgccatacccacngccaccgcagtatccgccttatcagccgatgttggcaacaccagcacagtcgcaagctagctcatcacaacaacctgcaccagcaacgctgcaccaggctcaagtccctcctccgcagcagacgacccagaactga

SEQ ID NO: 606 - protein, 482 aa, Oryza sativa
MAHRLLRDAQADGWERSDFPIICESCLGDNPYVRMLRAEYDKECKICARPFTVFRWRPGRDARYKKTEICQTCCKLKNVCQVCLLDLEYGLPVQVRDTALAINSNDAIPRSDVNREYFAEEHDRKARAGIDYDSSHGKARPNDTILKLQRTAPYYKRNRAHVCSFYVRGECTRGAECPYRHEMPETGELSQQNIKDRYYGVNDPVALKLLGKAGEMPSLTPPDDESIRTLYIGGLNNRITEQDLRDQFYAHGEIESIRMVLQRACAFVTYTTREGAEKAAEELANKLVIKGIRLKLMWGKPQAPKPEDDEAGRQGHVAHGGMLPRAVISQQQSGDQPQPPGMEGQQQAPSGSYYFNIPAPPGAERTLYPSMDPQRMGALVKSQEGDGKPGPQQAAQAQASSSSGQSYPMPPQYYHGQYPPYYPPYGGYMPPPGMPYPPPPQYPPYQPMLATPAQSQASSSQQPAPATLHQAQVPPPQQTTQN

SEQ ID NO: 607 - DNA, 1497 bp, Oryza sativa
atggcggtcaccgccgacgtgaagctcgagggcctccgcgccgccaccgacaagctcgaccagatcagcgagaacgagaagtccgggttcatcagcctcgtttcgcgctacctcagcggcgaggcggagcagatcgagtggagtaagatccagaccccgaccgacgaggtggtggttccctacgacacgctctcggctgctcccgaagatctcaacgagacgaagaagctgctcgacaaactcgtcgtgctcaagctcaatggaggcctcgggacgaccatgggctgcactggtcccaagtctgtcattgaagtccgcaatggctttacgtttctagaccttattgtgattcaaattgagtccctgaacaagaagtatggatgcaatgtccctttgcttctaatgaactcattcaacactcatgatgacacacagaagattgttgagaagtactccaactccaacattgaaattcacactttcaaccagagccaatatcctcgcattgttactgaagacttcttgccacttccaagcaaggggaagactggcaaggatggctggtatcccccaggccatggtgatgtgttcccctccttgaataacagtggaaaacttgataccttgttggcacagggcaaggagtatgtctttgtcgcgaactcggacaacttgggtgctattgttgacatcaagtttgaatccttaaccatcacagagatcttaaaccacctgatccataaccagaacgagtactgtatggaggttactcctaaaacattggctgatgttaaaggtggtaccctcatctcttacgaagggagagttcagctgttggagattgctcaagtccctgatgagcatgtgaatgaattcaagtcaattgagaagttcaagatcttcaataccaacaacctgtgggtgaacttgaaggccatcaagaggctggtagaagctgaagcacttaagatggaaatcattcctaaccctaaggaagttgatggtgtgaaagttctgcaactcgaaactgcagctggagcagccattcggttctttgaaaaagcaattggcattaatgttccccgctcgagatttctgccagtcaaggctacatctgatttgttgcttgtacagtctgatttgtacaccttggtcgatggctttgtcatccgcaacccagccagaacaaacccatcaaacccttcgattgagcttggacctgagttcaagaaggttgccaatttcctggcccggtttaagtcaatccccagcattgtcgagcttgacaccttgaaggtctctggtgatgtctggttcggctctggagttacactcaagggtaaggtgaccatcaccgccaagtcagggaagttggagatcccagatggagccgtgcttgagaacaagagtttactactgattgccacttcgtcagcttggcagtcgatgtgcgacgagtcgcacattacgacacggcctattgcgcggttgagctga

SEQ ID NO: 608 - protein, 498 aa, Oryza sativa
MAVTADVKLEGLRAATDKLDQISENEKSGFISLVSRYLSGEAEQIEWSKIQTPTDEVVVPYDTLSAAPEDLNETKKLLDKLVVLKLNGGLGTTMGCTGPKSVIEVRNGFTFLDLIVIQIESLNKKYGCNVPLLLMNSFNTHDDTQKIVEKYSNSNIEIHTFNQSQYPRIVTEDFLPLPSKGKTGKDGWYPPGHGDVFPSLNNSGKLDTLLAQGKEYVFVANSDNLGAIVDIKFESLTITEILNHLIHNQNEYCMEVTPKTLADVKGGTLISYEGRVQLLEIAQVPDEHVNEFKSIEKFKIFNTNNLWVNLKAIKRLVEAEALKMEIIPNPKEVDGVKVLQLETAAGAAIRFFEKAIGINVPRSRFLPVKATSDLLLVQSDLYTLVDGFVIRNPARTNPSNPSIELGPEFKKVANFLARFKSIPSIVELDTLKVSGDVWFGSGVTLKGKVTITAKSGKLEIPDGAVLENKSLLLIATSSAWQSMCDESHITTRPIARLS

SEQ ID NO: 609 - DNA, 2289 bp, Oryza sativa
atggtgactgttgtggaggaggtcgaccaccttcctatatatgatctggaccctaagttggaggaattcaaggatcacttcaactataggataaaaagatacctcgaccagaaatgcctgattgaaaaacatgaggggggccttgaagaattttctaaaggctatttgaagtttgggattaatacagttgatggtgccacaatatatcgtgaatgggcgcctgctgcacaagaagcacagctcattggtgagttcaataactggaatggtgcaaaacacaagatggagaaggataaatttggcatttggtcaatcaagatttcacatgtcaatgggaagcctgccatccctcacaattccaaggttaaatttcgctttaggcatgggggtggagcatgggttgatcgtattcccgcatggattcgttatgcaacttttgatgcctctaaatttggagctccatatgatggtgtacactgggatcctccagcctgtgaaaggtacgtgtttaagcatcctcgacctccaaaacctgatgctccacgcatctatgaggctcatgtggggatgagtggtgaagagccagaagtaagcacatacagagaatttgcagacaatgtgttaccacgcatacgggcaaataactacaacacagttcagttaatggcaatcatggaacattcctactatgcttcttttgggtatcacgtgacaaattttttcgcagtcagcagcagatcaggaacaccagaggatctgaaatatcttgttgacaaggcacatagtttaggattacgagttctgatggatgttgtccatagccatgcgagtaataatgtgaccgatggtctaaatggctatgacgttggacaaaacactcatgagtcttattttcatacaggagataggggctaccataaactctgggatagtcgtctgttcaactatgccaattgggaggtcttaagatttcttctttctaatttgagatattggatggacgaattcatgtttgatggcttccgatttgatggggttacatcaatgctataccatcaccatggtatcaataagggatttactggaaactacaaggagtatttcagtttggataccgatgtggatgcaattgtttacatgatgctcgcaaaccatttaatgcataaactcttgccggaagcaactattgttgctgaagatgtttcgggcatgccagtgctttgtcggccagttgatgaaggtggagtagggtttgacttccgcctggcaatggccattcctgatagatggattgactacctgaagaacaaagaggaccgcaaatggtcaatgagtgaaatagtgcaaactttgactaacaggagatatacagaaaaatgcattgcctatgccgagagccatgatcagtccattgttggtgacaagactatagcatttctcttgatggacaaggaaatgtacactggcatgtcagacttgcagcctgcttcacctaccatcaaccgtggcattgcactccaaaagatgattcacttcattacgatggcccttggaggtgatggctacttaaattttatgggcaatgagtttggccatccagaatggattgactttccaagagaaggcaacaactggagctatgataaatgcagacgtcagtggagccttgtcgacactgatcaccttcgatacaaggttgtgcctaagtatatcaattatatgaatgcatttgatcaagcaatgaatgcactcgaggaggaattttccttcctgtcatcatcaaagcagattgttagcgacatgaacgagaaagataaggttattgtctttgaacgtggagatttggtttttgttttcaattttcatcccaacaaaacttacaagggttacaaagtcggatgtgacttgcccgggaagtacagagtagctctggactctgatgctttggtctttggtggccatggaagagttggccatgatgtggatcacttcacgtctcccgagggaatgccaggagtaccagaaacaaatttcaacaaccgccctaactcattcaaagtcctttccccgccccgtacctgtgtggcttactatcgcgttgatgaagatcgtgaagagctcaggaggggtggagcagttgcttctggaaagattgttacagagtatatcgatgttgaagcaacaagtggggagactatctctggtggctggaagggctccgagaaggacgattgtggcaagaaagggatgaagtttgtgtttcggtcttctgacgaagactgcaaatga

SEQ ID NO: 610 - protein, 762 aa, Oryza sativa
MVTVVEEVDHLPIYDLDPKLEEFKDHFNYRIKRYLDQKCLIEKHEGGLEEFSKGYLKFGINTVDGATIYREWAPAAQEAQLIGEFNNWNGAKHKMEKDKFGIWSIKISHVNGKPAIPHNSKVKFRFRHGGGAWVDRIPAWIRYATFDASKFGAPYDGVHWDPPACERYVFKHPRPPKPDAPRIYEAHVGMSGEEPEVSTYREFADNVLPRIRANNYNTVQLMAIMEHSYYASFGYHVTNFFAVSSRSGTPEDLKYLVDKAHSLGLRVLMDVVHSHASNNVTDGLNGYDVGQNTHESYFHTGDRGYHKLWDSRLFNYANWEVLRFLLSNLRYWMDEFMFDGFRFDGVTSMLYHHHGINKGFTGNYKEYFSLDTDVDAIVYMMLANHLMHKLLPEATIVAEDVSGMPVLCRPVDEGGVGFDFRLAMAIPDRWIDYLKNKEDRKWSMSEIVQTLTNRRYTEKCIAYAESHDQSIVGDKTIAFLLMDKEMYTGMSDLQPASPTINRGIALQKMIHFITMALGGDGYLNFMGNEFGHPEWIDFPREGNNWSYDKCRRQWSLVDTDHLRYKVVPKYINYMNAFDQAMNALEEEFSFLSSSKQIVSDMNEKDKVIVFERGDLVFVFNFHPNKTYKGYKVGCDLPGKYRVALDSDALVFGGHGRVGHDVDHFTSPEGMPGVPETNFNNRPNSFKVLSPPRTCVAYYRVDEDREELRRGGAVASGKIVTEYIDVEATSGETISGGWKGSEKDDCGKKGMKFVFRSSDEDCK

SEQ ID NO: 611 - DNA, 1650 bp, Oryza sativa
  misc_feature (1200)..(1200): n = any nucleotide
atgcaggcgtggttctccggcacggggccctccgcctcgtcggcgtcgtcgtcgtcgtcgccgccgcagccgtcgctgctcgcggaatggaactcctacgccgccgcgcgctccgcggaggaggaggaggacggcggcgggggaggcttcgggatcgacatcgaggccgccgtccgctccgccaacgaccgcgtctccggcaccttcggcgtggtatctaaaggtgttctagggttgccaggcagcttcaagtccacaacaagcagtgttccatcgagcaaatcacttgtgtattttggcctttttcttgctagtggaatattcctagttttcattgcgttcacgatatttctgccagtcatgaggttacctttcaccatgggatttgtgggcagcatggctgctaccatctacgtgtcaatggtgctccatagctacatactttcagttttcttctcttgtcttcagaatttgacaggaattttgggtggcatggcgcggctcccctatccgggaacgggtgatggggttttcgccgcccatggatatctcagattcggcctgggaatttggtatatcctctctctttctctctctgcgtatgagctgatcaagacggccaagtacatcgcgacgccggggaagggcatcctcgccgccgacgagtcgacgggcaccatcggcaagcgcctggccagcatcaacgtggagaacgtggagcccaaccgccaggcgctccgggagctcctcttcacgacgcccggcgcgttccagtacctctccggcgtcatcctcttcgaggagacgctctaccagagcacggccgccggcacgccgttcgtcgacgtgctcaaggccggcggcgtcgtgccggggatcaaggtggacaagggcaccgtggacatcgccggcaccaacggcgagaccaccacccagggcctcgactccctgggcgcgcgctgcgccaagtactacgaggccggcgcccgcttcgccaagtggcgggccgtgctcaagatcggcgccgccggcgagccgtccgagctcgccgtcaagcagaacgccgagggcctcgcccggtacgcgctcatctgccaggagaacggcctcgtccccatcgtcgagcccgagatcctcaccgacggcgcccacgacatcaagacctgcgccgccgtcaccgagcgcgtcctcgccgccgtntacaagtctctcaacgaccacaaggtcctcctcgagggcaccctcctcaagcccaacatggtcacccctggctccgacagcccaaaggttggcgcggaggtgataggggagtacacggtggcggcgctgcggcgcacggtgccaccggcggtgcccgggatagtgttcctctccggcgggcagagcgaggaggaggcgtcgcagaacctgaacgccatgaacaagctggaggtgctcaagccatggacgctcaccttctccttcggccgtgccctgcagcagagcaccatcaagaagtggggcggcaagaaggagaacgtcgccgccgctcaggctgccttcctcgcccggtgcaaggccaactccgaggccacgctcggcaagtacggcggcgccgccggcgacgccgccacgtccgagagcttgtacgtcaagggctacacctactag

SEQ ID NO: 612 - protein, 549 aa, Oryza sativa; identical to SEQ ID NO: 178

SEQ ID NO: 613 - DNA, 1461 bp, Oryza sativa
atggcgaagtcatcgtccctcgtgacgaaggtttcggcgcagcggcggcggcgagtgcaccgtcctcgccgttctccgaccaagccggagcgctctgccgccgccgtggcgctgagccacgagaagattcttctcgccggcgttgatgcagccgccgacatgttcggttccctcgcgggttgtccctcgtcgccggagtatccggtggtgccggacatggacgaccgctacgtcgacggcgccgtggatgacgctccggcggcggcggcgggccgacgcgcgtcggacgagacgctggcggtgcacgccggggagaagctcgggagcggcgccgctgagacggactcgatcgcgacgccgatcgtgagcggcacgacgcactggttcagggactcggcggacctcatcgcgttccgggaaggccggcggcggagcttcgagtacgggcggtacggcaacccgacggtgaaggtgctggaggagaagatcagcgcgctggagagggcggaggcgacgctggtgacctcctccggtatgaacgccatcgtcgccacgctgctcgccctcgtccctcccggcggccacgtcgtcgccaccgccgactgctacagcgaggcccgcgcattcatccgcgacaagctctccaacatgggcatcacgtcgacgttcgtcgatcttgacgacgacatggaggcgctggaatgtgttcttgatgagagcgaggtgacgatgttctacgccgactcgatgacgaaccctcacctgaaggtcgtcgacgtgacacgcgtggcggagctgtgccaccggagaggcgcgctggtgtgcatcgacagcacgctggcatcgcccatcaaccagaagccgctcgccctcggcgccgacgtggtcctccactccgccaccaagtacatcgccggccaccacgacgtcatcgccggctgcgtcagcggctcggaggccctcatctcgcggatccgcgcgtggcaccacgacctcggcggcgccatcagtccgaacgcggcgtacatgatcattcggggattgaagacgattgcgctgcgggtggaggcgcagaacaggacggcgctgcggatggcgcggctgctggagaagcaccccaagatcgagcgcgtctactaccctgggctggagagcagcctgtggcacggcgtcgcgacgaggcagatggccggcgccggcggcgtggtcagcttcgatgtggcgtcggacttgcgcggcgtgatgaggttcgtggatgcgctggagttgcctctcatcgcaacgtcgctcggtggatgtgaaagccttgtgcagcaaccggccgtcatgtcctactggggtaagagtgaggaggagaaggcgaagaatgggatcaaggataattttgtgaggttcagttttgggattgagaagtttgaggatctcagggacgacatactccaggccctagagaagatttag

SEQ ID NO: 614 - protein, 486 aa, Oryza sativa
MAKSSSLVTKVSAQRRRRVHRPRRSPTKPERSAAAVALSHEKILLAGVDAAADMFGSLAGCPSSPEYPVVPDMDDRYVDGAVDDAPAAAAGRRASDETLAVHAGEKLGSGAAETDSIATPIVSGTTHWFRDSADLIAFREGRRRSFEYGRYGNPTVKVLEEKISALERAEATLVTSSGMNAIVATLLALVPPGGHVVATADCYSEARAFIRDKLSNMGITSTFVDLDDDMEALECVLDESEVTMFYADSMTNPHLKVVDVTRVAELCHRRGALVCIDSTLASPINQKPLALGADVVLHSATKYIAGHHDVIAGCVSGSEALISRIRAWHHDLGGAISPNAAYMIIRGLKTIALRVEAQNRTALRMARLLEKHPKIERVYYPGLESSLWHGVATRQMAGAGGVVSFDVASDLRGVMRFVDALELPLIATSLGGCESLVQQPAVMSYWGKSEEEKAKNGIKDNFVRFSFGIEKFEDLRDDILQALEKI

SEQ ID NO: 615 - DNA, 3129 bp, Oryza sativa
  misc_feature (199)..(199): n = any nucleotide
  misc_feature (234)..(234): n = any nucleotide
  misc_feature (238)..(238): n = any nucleotide
  misc_feature (252)..(252): n = any nucleotide
atgcggctctacctgtacgtgatcgaggcgcggggcctcccggagcacggcggcgatgggggccgagggccgtactacgcgagggcgaaggtggggaagcagagggcgcggacgcgggaggttgaggcgcgcggcggcggggcgtcggcggcggcggcggagtggaacgaggagctggtgctcgaggtggacgggggcnaggcggtggaggtcggggtggcgcggcggcggganggcngcgggcgcggcggnagggaggtggtgggcagggtgaagctgccggtgcccgccgccgccgtccccgcggggaggaggagaaggacgaccgtgccgccgacgtggttcacgctgcagcccaagcaccaccgccgctggaagaagggcgcggcggaggcggcggattgcgggaaaattcttctcaccttttcactgcatggagaaaacagcgacaatactgttatccactcatcaccttgttcgagctctaggagcgacactgacattgaatttgagagatcaacttattgggaacattcaagttccaacagtgggacggttgattctcccaggagttttgcaatagaacgatcttctttagaaaattctgaccgttcagcccaagcaaattccaattccaactctgaagatgatgatctaacagagcctagtgcagcaacagcaaagggcacaagtgacatcgaaccaatggttccagatgcaagctttgaagaagctatggaaatcatgaagtctaaaagcatccctgacatgccagaagatcttaatggtggtgtcatgttcgatcacacttaccttgtggactcgaagaatttgaactctcttatctttgggcctgattctcagttctccaaagagttgcgcgagttgcaaggaactatggactatgaggaacagccatggacatggaacaataataatcctcctagcttaaccaggacatgtcaatacaccaaaggtgcaacaaaatttatgaaagccgtcaaaactattgaagagcaaacatatcttaaagcagatggcaagagttatgtaattatgactcgtgttcgtactcccgaggttccatttggaaattgttttgaggttgttatgctgtacaaaataattcactaccctgagttgtcgtcaagtgaaggaatgtcacatctgactgtatcatacaatgtagagttccttcagagtaccatgatgaaaagtatgattgagggaagtgttcgggatggactgaaagaaaattttgaaagttacgcagaaattttgtctcggcatgtaaaaattgctgattctgctgggatggataaagagcgattattggcaccgctccagactgatcatcagtcagatatcagacttgcttacaagtatttttgcaatttcacagtcatctctacagtgataatggcactgtatgttcttgtacacatctttctgtcaagaccaggccctcttatgggtcttgagttcaaaggtcttgatttacctgacacgtttggagagctgatcatatctggcatactagttcttcagctagaacgtttactgagtatgatatctcgttttgtagaggtaagggtacagcgaggaagtgatcacgggattaaagcaaatggagatggttggttgttaactgtagctctgctagaggccacaagcttgccgcctgtctctagcggttccgtagatccttatgttgtgttcagctgtaacggcataacacgaacaagctctgtgcaacttcagactcatgaccctcaatggaacgagataatggagtttgatgccatggaagaaccacctgctacgttggatgttgaggttttcaattttgatggaccatttgatctggcagtttctctgggacatgctgaaattaacttccttaaacacacgtcagcagaactagcagatatatgggtgccactggaaggtaaattagctcagacttgtcagagtaggttacatttgagaatatttctggagaacacaaaaggacctgagacatcaatgagagagtacttaagtaagatggagaaggaagttggtaagaagttacatgttcagtcacctcacagaaatgcaacgttccagaagctttttggtttaccacacgaagaattccttatagcagtttatgcgtgctccttgaaacggaagttgccgttgcagggaagactgtttctgtcagccagaatagttggtttctatgccaatctgtttggacataaaacgaaattcttctttctgtgggaagatgtcgaggaaatcgaagagttaactccatctttcacaacagtaggtactccatctttgttgtttgtcttgaagagcggccggggactcgatgccaagaatggtgcaaagtcccaagataaggaaggcaggacaataattggactatggaaaaccaaatcatcagctattgaacagagggctaaactagaagaagatcaagaagatgaaaactatgtcgatcttaatgatgttcaatctgtattgagcattggagatgtgccactgtcaaaggagtatactttggaactgcctatcgattggaagaggctagataagttatacagtacttgtgtaaacatggatgtgaattttcatccctcgagggcggatctgctgatgggggtgttcgacgggggccccctggaggcgaaggcgatgagcagggcgggttgcctcgactacgccgccaccccgtggcaggacgcccggcccggcgtcctggagcggcacgccagctacaagttcaaccgctacatgtccatcttcggcggcgaggtcgtcagcacccagctcaggctcccctccgacgacggcgacggctggaccgtctacgacgtcatcacgctgcgcaacgtccccttcggcgacttcttccggttgcatttgaggcacaacatatggagcgtggaggccgcgtcgtcggaggcggcggcgagcagcgggagccggtgcgagatactggtggggatcgagtgggtgaagaggagcaagttccagaagaggatcgcgaggaacatctgcgagaagctggcgcacagggcgaaggaggtgctcgaggcggccgccagggagatcgccccggccttgtcgggctag

SEQ ID NO: 616 - protein, 1042 aa, Oryza sativa
MRLYLYVIEARGLPEHGGDGGRGPYYARAKVGKQRARTREVEARGGGASAAAAEWNEELVLEVDGGQAVEVGVARRRDGRGRGGREVVGRVKLPVPAAAVPAGRRRRTTVPPTWFTLQPKHHRRWKKGAAEAADCGKILLTFSLHGENSDNTVIHSSPCSSSRSDTDIEFERSTYWEHSSSNSGTVDSPRSFAIERSSLENSDRSAQANSNSNSEDDDLTEPSAATAKGTSDIEPMVPDASFEEAMEIMKSKSIPDMPEDLNGGVMFDHTYLVDSKNLNSLIFGPDSQFSKELRELQGTMDYEEQPWTWNNNNPPSLTRTCQYTKGATKFMKAVKTIEEQTYLKADGKSYVIMTRVRTPEVPFGNCFEVVMLYKIIHYPELSSSEGMSHLTVSYNVEFLQSTMMKSMIEGSVRDGLKENFESYAEILSRHVKIADSAGMDKERLLAPLQTDHQSDIRLAYKYFCNFTVISTVIMALYVLVHIFLSRPGPLMGLEFKGLDLPDTFGELIISGILVLQLERLLSMISRFVEVRVQRGSDHGIKANGDGWLLTVALLEATSLPPVSSGSVDPYVVFSCNGITRTSSVQLQTHDPQWNEIMEFDAMEEPPATLDVEVFNFDGPFDLAVSLGHAEINFLKHTSAELADIWVPLEGKLAQTCQSRLHLRIFLENTKGPETSMREYLSKMEKEVGKKLHVQSPHRNATFQKLFGLPHEEFLIAVYACSLKRKLPLQGRLFLSARIVGFYANLFGHKTKFFFLWEDVEEIEELTPSFTTVGTPSLLFVLKSGRGLDAKNGAKSQDKEGRTIIGLWKTKSSAIEQRAKLEEDQEDENYVDLNDVQSVLSIGDVPLSKEYTLELPIDWKRLDKLYSTCVNMDVNFHPSRADLLMGVFDGGPLEAKAMSRAGCLDYAATPWQDARPGVLERHASYKFNRYMSIFGGEVVSTQLRLPSDDGDGWTVYDVITLRNVPFGDFFRLHLRHNIWSVEAASSEAAASSGSRCEILVGIEWVKRSKFQKRIARNICEKLAHRAKEVLEAAAREIAPALSG

SEQ ID NO: 617 - DNA, 771 bp, Oryza sativa
atggccggatccggcaagttcttcgttggaggcaactggaagtgcaatggaacgaaggactctgtcagcaagcttgtgactgaattgaatgctgctacacttgaacctgatgttgatgttgtggttgcaccaccattcatttatattgatcaggttaagaactcactaactgatcgtattgaggtatctgctcagaatgtttggattggaaaaggaggagcatacactggagagatcagtgcggagcaattggtggacattggctgccaatgggttattcttgggcattcagagcgtagacatgtcattggtgaagatgatcagtttattgggaagaaggctgcatatgccttgagtcaaaatgtaaaggttattgcctgcataggggagctgttggaagagagagaagcagggaaaacttttgacgtctgttttaagcagatgaaggcttttgcagacagtattacaaactgggcggatgtagtaattgcatatgagcctgtttgggctattggaaccgggaaagttgctactcctgagcaagctcaggaagttcatgctgctgttcgtgattggttgaaaaccaacgtgtcacctgaggttgcttccggcattcgaattatatatggaggttctgtaaatgcagccaattgtgccgagctagcaaagaaagaagatattgacggcttccttgttggtggtgcctctttgaagggtccggattttgccactattatcaactcggtgacttccaagaaagttgcagcctga

SEQ ID NO: 618 - protein, 256 aa, Oryza sativa
MAGSGKFFVGGNWKCNGTKDSVSKLVTELNAATLEPDVDVVVAPPFIYIDQVKNSLTDRIEVSAQNVWIGKGGAYTGEISAEQLVDIGCQWVILGHSERRHVIGEDDQFIGKKAAYALSQNVKVIACIGELLEEREAGKTFDVCFKQMKAFADSITNWADVVIAYEPVWAIGTGKVATPEQAQEVHAAVRDWLKTNVSPEVASGIRIIYGGSVNAANCAELAKKEDIDGFLVGGASLKGPDFATIINSVTSKKVAA

SEQ ID NO: 619 - DNA, 2658 bp, Oryza sativa
  misc_feature (88)..(88): n = any nucleotide
  misc_feature (91)..(91): n = any nucleotide
  misc_feature (94)..(94): n = any nucleotide
  misc_feature (100)..(100): n = any nucleotide
  misc_feature (156)..(156): n = any nucleotide
  misc_feature (191)..(191): n = any nucleotide
  misc_feature (194)..(194): n = any nucleotide
  misc_feature (1445)..(1445): n = any nucleotide
  misc_feature (1760)..(1760): n = any nucleotide
  misc_feature (2285)..(2285): n = any nucleotide
  misc_feature (2291)..(2291): n = any nucleotide
  misc_feature (2297)..(2297): n = any nucleotide
atggggagggggatagggtcgaagcggagggtggaggacgacgacggggagaatatgccggggaggaagaagaaggaggaggaggagnagnagnaggatnacgatggggaagaggagtacgaggtggacgtggtgcgcgaccggatcgggtcgtcncgggggagccgcctggcgctgttcggctccgactncgnctcggccgctttcgcccgcgccgccgccgcgttgcccccgtcgacggcgacgatggcatcttccaggacttcgtcatcgaccccgacaacaagtcactacacatcagttgactttggttccaatttgtacttgccaagaaccggtaaaacaggacggatcctgttcgacatgaggtggtatcggttatggacgaggttcatactagtgtgggcagtgtacagttccttcttcacgccattggaatttggcttcttcagggggctccccaggaacctcttcttcctagacatagctggtcagatcgccttcctcatcgacattgttctcaggttcttcgtggcctaccgtgatcctgacacctaccgcatggttcacaatcccacctccatcgctctccgatattgtaaatcaagcttcatttttgatcttcttggttgttttccgtgggatgctatctataaggcttgtggaagtaaagaagaagtaagatacctattgtggattcggttgacacgagctatgaaggtgacagagttcttcaggagcatggaaaaagatatccgtataaattacctgtttactaggattgtgaaactcatagttgtggaactctactgtacgcacacagcagcatgtatcttctactatcttgcaacaacacttcctgaatcaatggaaggatatacatggatagggagcttgcagttgggagactatagttattctcatttcagggagattgatcttaccaagcgttatatgacatcgctgtactttgccatagtcaccatggcaactgttggttatggtgacattcatgctgtgaatgtcagggagatgatattcatcatgatttatgtttcctttgatatgattcttggagcctacctcattggtaacatgactgcacttattgtcaagggctcgagaaccgagcgattcagggataagatgaaagaagttatcaggtacatgaacagaaacaagcttggaaaggacataagggaacagattaaaggacatttgaggttgcagtatgaaagcagctacactgaagcttctgtccttcaggatatcccagtctcaattcgtgcgaagatttcacaaacactgtataagccatatatcgaaagcattccactgtttaaaggatgttcagcagaattcattcaacagattgtgatcaggctgcaggaagagttcttcctacccggagaggttattttggagcagggaagtgcagttgatcnactgtactttgtctgtcatggggcactggaaggtgttggcattggtgaagatggtcaagaagagaccattctaatgctagagcctgaaagttcttttggagaaatcgctgttctctgcaatatcccacaacccttcaccgttcgtgtctgcgaactttgtcgtcttttgcggcttgacaagcaatccttcacaaacatcctggagatcttcttcgttgatggaagaagaattctgagcaacctttctgagagtagcgaatacggcagccggatcaagcagctggaatccgacatcacgttccacatcgggaagcnagaggcagagctgacgctgcgagtgaacaacgctgcgttctacggtgacatgcatcagctcaagagcctgatccgtgcaggagccgatcccaagaacaccgattacgacgggcgatctcctctgcatcttgcggcttgcaaagggttcgaagatgtcgtccagttcctcctccacgaaggcgtcgacatcgatctttccgacaaatttggcaacacgccattgctggaggcggtgaagcaggggcacgaccgggtggcgacgctgctgttcagcaagggggcgaagctgagcctggagaacgccgggagccacctgtgcacggcggtggcgaggggcgacacggacttcgtccggcgggcgctcgcctacggcggcgacccgaacgcgagggactacgaccaccgcgcgccgctccacatcgccgccgccgagggcctctacctgatggcgaagctgctcgtcgacgccggcgccagcgtgttcgccaccgaccggtggggcacgacgccgctggacgaagggcncaggtncggganccggacgatggtgcagctgctggaggcggccaagtccggcgagctctccaggtacccggagcgcggcgaggaggtgcgggacaagatgcacccgcggcggtgctccgtgttcccgcaccacccgtgggacggcggcgagcggcggcgggaaggggtggtggtgtggatcccgcacaccatcgaggggctcgtcagctcggcgcaggagaagctcggcctcgccggctccggcgaggggctccggctgctcggcgaggacggcgccagagtgctcgacgtcgacatggtccacgacgggcagaagctctacctcgtcgtcggcggcggcggcgatgacggcggcacggaggcaaggcagtga

SEQ ID NO: 620 - protein, 885 aa, Oryza sativa
MGRGIGSKRRVEDDDGENMPGRKKKEEEEQQQDHDGEEEYEVDVVRDRIGSSRGSRLALFGSDSASAAFARAAAALPPSTATMASSRTSSSTPTTSHYTSVDFGSNLYLPRTGKTGRILFDMRWYRLWTRFILVWAVYSSFFTPLEFGFFRGLPRNLFFLDIAGQIAFLIDIVLRFFVAYRDPDTYRMVHNPTSIALRYCKSSFIFDLLGCFPWDAIYKACGSKEEVRYLLWIRLTRAMKVTEFFRSMEKDIRINYLFTRIVKLIVVELYCTHTAACIFYYLATTLPESMEGYTWIGSLQLGDYSYSHFREIDLTKRYMTSLYFAIVTMATVGYGDIHAVNVREMIFIMIYVSFDMILGAYLIGNMTALIVKGSRTERFRDKMKEVIRYMNRNKLGKDIREQIKGHLRLQYESSYTEASVLQDIPVSIRAKISQTLYKPYIESIPLFKGCSAEFIQQIVIRLQEEFFLPGEVILEQGSAVDQLYFVCHGALEGVGIGEDGQEETILMLEPESSFGEIAVLCNIPQPFTVRVCELCRLLRLDKQSFTNILEIFFVDGRRILSNLSESSEYGSRIKQLESDITFHIGKQEAELTLRVNNAAFYGDMHQLKSLIRAGADPKNTDYDGRSPLHLAACKGFEDVVQFLLHEGVDIDLSDKFGNTPLLEAVKQGHDRVATLLFSKGAKLSLENAGSHLCTAVARGDTDFVRRALAYGGDPNARDYDHRAPLHIAAAEGLYLMAKLLVDAGASVFATDRWGTTPLDEGPRSGTRTMVQLLEAAKSGELSRYPERGEEVRDKMHPRRCSVFPHHPWDGGERRREGVVVWIPHTIEGLVSSAQEKLGLAGSGEGLRLLGEDGARVLDVDMVHDGQKLYLVVGGGGDDGGTEARQ

SEQ ID NO: 621 - DNA, 486 bp, Oryza sativa
  misc_feature (119)..(119): n = any nucleotide
atgacggcggcggcggcggtgccgaacgcgctgatgagcagatgctggggatggaggcactatggcagacgctgggggacacactggcatcggcggcctacgcggcggcagtggcggcnggggctgagcggtggcggtgggggtggcctccgatctcccctggcctcaaccgccgggggagaagctgcgcacgggcggcagccgccgagggcgtcgcggctccgatcctcaagcgccctcatggcgtcgccatcgtcaccgcgttcctcctgcctcgccgccaccgccgacgcgggagttgaacttgtccccctcctaatgtactcgccacaggcgacgcagttctgccagccgttcttatgctgccaccaccgccaagccgacgccgacgccagcggcggccgctgggaggcgttggccgagctggaggaggacaacgagatggtgtgtggtgctggaggactcctctcgcgccatttgccatag

SEQ ID NO: 622 - protein, 161 aa, Oryza sativa; identical to SEQ ID NO: 332

SEQ ID NO: 623 - DNA, 1044 bp, Oryza sativa
atgctgtcggggtgcacggtgtccagtctcgcggcgaggttcgccttcttcccgccggagccggcgacctacgccgtcaggaaggatgaggcgtgcggcggcggagggcggctggtggcgtcgggcgtcccgcgggacgccgccgtggacgtgctgctggtggacaccaggaaggggagcaaggtggtggccttctacctgaggaaccccgccgcccgcctcaccgtgctctactcgcacggcaacgccgccgacctcggccagctctacgacctcttcgtgcagctcaaggtcaatctcaaggtcaatctgatgggatatgactactctgggtatggagcatctactggcaagccaagtgaagagaatacatatgcagacattgaggcagtttaccagtgcttagaaacagagtatggaatcagtcaggaagaccttatcttgtatggacaatctgttggcagtggacctacattgcatttagcttcccgtttaccaagattgcgtggcgtggttcttcatagcgctatactgtcaggcctccgagttgtttgccatgtgaactttactttctgctttgacatctacaaaaatgtgaagaaaatcaaaaaggttaaatccccagtgcttgttattcatggaactgatgatgatgtcgtgaactggtcgcatggtaacgagctgtggaaactggcgagggagccttacgatccgctatggatcaaaggaggaggccattgcaacctggagctgtacccggacttcatccgccacctctccaagttcatccgcgagatggagaacatcacaacgaagacaaggcttaagaagatccggcagtccctgcaacccgcacctaagaaggtccaccaccgggcgagcaccgggacgaccaccaccttcaccaccaactgctgctgccgcatccggctgcaggggatgcttcaagtgcccaacctgcttctccttctcctgcagctgctgcaggagctgcctcaagtgcccaaccttcaaatgctgctgctgcggttcatgcagagatga

SEQ ID NO: 624 - protein, 347 aa, Oryza sativa
MLSGCTVSSLAARFAFFPPEPATYAVRKDEACGGGGRLVASGVPRDAAVDVLLVDTRKGSKVVAFYLRNPAARLTVLYSHGNAADLGQLYDLFVQLKVNLKVNLMGYDYSGYGASTGKPSEENTYADIEAVYQCLETEYGISQEDLILYGQSVGSGPTLHLASRLPRLRGVVLHSAILSGLRVVCHVNFTFCFDIYKNVKKIKKVKSPVLVIHGTDDDVVNWSHGNELWKLAREPYDPLWIKGGGHCNLELYPDFIRHLSKFIREMENITTKTRLKKIRQSLQPAPKKVHHRASTGTTTTFTTNCCCRIRLQGMLQVPNLLLLLLQLLQELPQVPNLQMLLLRFMQR

SEQ ID NO: 625 - DNA, 1713 bp, Oryza sativa
atgggaaaatggcatccttgtcctggaaggacttacgataattttggctgccgcatgccaacgcaactacctaggaaccagcatagtgctgcagcagaatccaaccaacttacatacactggagatggatctgtcgacttttctgggaatcctgttgtgaaggagagaactggtagatggagggcatgcccatttatcttaggtaatgagtgctgtgagcggttggcctattatggaatctccacaaaccttgttacatacttgacaaagaaactgcatgatggtaatgcttctgctgctagcaatgtgactgcatggcagggaacttgctacttaactccccttattggagctatactggctgatgcatactggggaagcctccaccttgcgaaggtcctttgcccaccagcaaatccattgcagtatactgtcttttttcttggactttacctaattgctcttggtactggtggtattaagccctgtgtctcatcctttggagcagatcaatttgatgatacagacccagttgagcgaatccagaagggatctttctttaactggttctatttctcaataaacattggtgctctcatatcaagcagttttctggtttgggtgcaagacaatataggatggggaataggctttggcattccaacaattttcatggggctggccatcataagtttcttctctggaacatcactttatagattccaaaagccaggcggcagtcctattacacgagtatgccaggtggttgttgcctcctttcgcaagtggaacgtacatgttccagaggatagctctcgcttgtatgagttgcctgatggggcttcagcaattgaagggagtcggcaattggagcacaccgatgaactcagatgtctggacaaagctgctacaattactgatcttgatgtgaaagcagatagctttacaaacccatggcgaatatgcactgtgactcaggtggaagaactgaagatattggtaaggatgttccctgtctgggcaacgactattgtgttttctgctgtctatgctcagatgtccaccatgtttgttgagcaagggatgatgcttgatacatcagtaggtccattcaagattcctccagcatctctatctacctttgatgtggtaagtgtcattatatgggtccccctctatgatagtatcttggttccaatagctaggaggttcactggcaacccgaggggctttacagagttacagaggatggggattggtttggtaatctcaatcttttcgatggcggcagctgcagttcttgagattaaaaggttggacattgcaagggctgaacatttggtggatcaaaatgttccagtaccactgaacatctgctggcaaattcctcaatatttcttggttggtgcctcagaggtcttcacatttgtcgggtcacttgagttcttctatgatcaatcaccggatgccatgaggagcctctgcagcgcactgcagcttgtcacaacagctcttgggaattatctcagtgcattcattttgacattggttgcgtacttcacaacaagaggaggaaatcctggatggattcctgataacttgaatcaaggtcacctagattatttcttctggcttcttgctgggctcagttttctgaactttgtgatatatgtcatctgcgcaaacaaatacaaaagcaagaaagcagcttga

SEQ ID NO: 626 - protein, 570 aa, Oryza sativa
MGKWHPCPGRTYDNFGCRMPTQLPRNQHSAAAESNQLTYTGDGSVDFSGNPVVKERTGRWRACPFILGNECCERLAYYGISTNLVTYLTKKLHDGNASAASNVTAWQGTCYLTPLIGAILADAYWGSLHLAKVLCPPANPLQYTVFFLGLYLIALGTGGIKPCVSSFGADQFDDTDPVERIQKGSFFNWFYFSINIGALISSSFLVWVQDNIGWGIGFGIPTIFMGLAIISFFSGTSLYRFQKPGGSPITRVCQVVVASFRKWNVHVPEDSSRLYELPDGASAIEGSRQLEHTDELRCLDKAATITDLDVKADSFTNPWRICTVTQVEELKILVRMFPVWATTIVFSAVYAQMSTMFVEQGMMLDTSVGPFKIPPASLSTFDVVSVIIWVPLYDSILVPIARRFTGNPRGFTELQRMGIGLVISIFSMAAAAVLEIKRLDIARAEHLVDQNVPVPLNICWQIPQYFLVGASEVFTFVGSLEFFYDQSPDAMRSLCSALQLVTTALGNYLSAFILTLVAYFTTRGGNPGWIPDNLNQGHLDYFFWLLAGLSFLNFVIYVICANKYKSKKAA

SEQ ID NO: 627 - DNA, 636 bp, Oryza sativa
atggcagccaccaccggctattgccgatctccctcaccggagcattgccggacaaaccctcgcgccaccgggcttgccttgatgagccgtcctataagccactatagccacttcttttaccggccggagcaagcttttgccgccgccgttccggcttcatatctcacttccactgccgacctctgccgtccccggatgcgcgtcgacggggaacatgttatgttgccgacgtcgccgcgtttcggccaccggagggccggcgccccgctcgtcctctcttctccctctctcgctgccaacggaagaggagaagaaagaagacgggaggaaggagaagaaaaagaaaaagaaacactgacaggccccgacgtcgaaccattggctgtaaagcccggcaaaactcaaacccaaggtcgaagtgctgctcctagcaccctacgccttgatgcgtataatgatcggagcttcactatcccctcgacctccacagcacgccgcacagttagctctctggctctgtgtgatcctagccgctccgccgccactcacggttgtcggagtaacacttccaccccactaaacctacacaaatctcctattcctctagtcgttatcctttttgttgacaccggctag

SEQ ID NO: 628 - protein, 211 aa, Oryza sativa
MAATTGYCRSPSPEHCRTNPRATGLALMSRPISHYSHFFYRPEQAFAAAVPASYLTSTADLCRPRMRVDGEHVMLPTSPRFGHRRAGAPLVLSSPSLAANGRGEERRREEGEEKEKETLTGPDVEPLAVKPGKTQTQGRSAAPSTLRLDAYNDRSFTIPSTSTARRTVSSLALCDPSRSAATHGCRSNTSTPLNLHKSPIPLVVILFVDTG

SEQ ID NO: 629 - DNA, 1287 bp, Oryza sativa
  misc_feature (546)..(546): n = any nucleotide
  misc_feature (555)..(555): n = any nucleotide
  misc_feature (634)..(634): n = any nucleotide
  misc_feature (696)..(697): n = any nucleotide
atggtgaacaaacacttcttgtccctttcggtcctcatcgtcctccttggcctctcctccaacttgacagccgggcaagtcctgtttcagggattcaactgggagtcgtggaaggagaatggcgggtggtacaacttcctgatgggcaaggtggacgacatcgccgcagccggcatcacccacgtctggctccctccgccgtctcactctgtcggcgagcaaggctacatgcctgggcggctgtacgatctggacgcgtctaagtacggcaacgaggcgcagctcaagtcgctgatcgaggcgttccatggcaagggcgtccaggtgatcgccgacatcgtcatcaaccaccgcacggcggagcacaaggacggccgcggcatctactgcctcttcgagggcgggacgcccgactcccgcctcgactggggcccgcacatgatctgccgcgacgacccctacggcgatggcaccggcaacccggacaccggcgccgacttcgccgccgcgccggacatcgaccacctcaacaagcgcgtccagcgngagctcatnggctggctcgactggctcaagatggacatcggcttcgacgcgtggcgcctcgacttcgccaagggctactccgccgacntggcaaagatctacatcgacgccaccgagccgagcttcgccgtggccgagatatggacgtcnntggcgaacggcggggacggcaagccgaactacgaccagaacgcgcaccggcaggagctggtcaactgggtcgatcgtgtcggcggcgccaacagcaacgccacggcgttcgacttcaccaccaagggcatcctcaacgtcgccgtggagggcgagctgtggcgcctccgcggcgaggacggcaaggcgcccggcatgatcgggtggtggccggccaaggcgacgaccttcgtcgacaaccacgacaccggctcgacgcagcacctgtggccgttcccctccgacaaggtcatgcagggctacgcatacatcctcacccaccccggcaacccatgcatcttctacgaccatttcttcgattggggtctcaaggaggagatcgagcgcctggtgtcaatcagaaaccggcaggggatccacccggcgagcgagctgcgcatcatggaagctgacagcgatctctacctcgcggagatcgatggcaaggtgatcacaaagattggaccaagatacgacgtcgaacacctcatccccgaaggcttccaggtcgtcgcgcacggtgatggctacgcaatctgggagaaaatctga

SEQ ID NO: 630 - protein, 428 aa, Oryza sativa
MVNKHFLSLSVLIVLLGLSSNLTAGQVLFQGFNWESWKENGGWYNFLMGKVDDIAAAGITHVWLPPPSHSVGEQGYMPGRLYDLDASKYGNEAQLKSLIEAFHGKGVQVIADIVINHRTAEHKDGRGIYCLFEGGTPDSRLDWGPHMICRDDPYGDGTGNPDTGADFAAAPDIDHLNKRVQRELIGWLDWLKMDIGFDAWRLDFAKGYSADLAKIYIDATEPSFAVAEIWTSMANGGDGKPNYDQNAHRQELVNWVDRVGGANSNATAFDFTTKGILNVAVEGELWRLRGEDGKAPGMIGWWPAKATTFVDNHDTGSTQHLWPFPSDKVMQGYAYILTHPGNPCIFYDHFFDWGLKEEIERLVSIRNRQGIHPASELRIMEADSDLYLAEIDGKVITKIGPRYDVEHLIPEGFQVVAHGDGYAIWEKI

SEQ ID NO: 631 - DNA, 1413 bp, Oryza sativa
atgggcaagcaccatgtcaccctgtgttgtgtcgtttttgctgtgctctgcctggcgtccagcttagcacaagcccaagttctcttccaggggtttaactgggagtcgtggaggaagcaaggcgggtggtacaactttctgcacgagaaggtggaggagatcgccagcacgggcgccacccacgtctggctcccgccgccgtcgcactctgtctcgccgcagggttacatgccggggcggctctacgacctggacgcgtccaagtacggcacggaggcggagctcaagtcgctgatcgaggcattccacgacaagaacgtcgagtgcctcgccgacatcgtcatcaaccaccgctgcgccgactacaaggacagccgcggcgtgtactgcgtgttcgagggcggcacgcccgacggccgcctcgactggggccccgacatgatctgcagcgacgacacgcagtactccaacggccgcggccaccgcgacaccggcgccgggttcggcgccgcgcccgacatcgaccacctcaacccgcgtgtccagcgggagctcaccgactggctcaactggctcaggaccgacctcggcttcgacggctggcgcctcgacttcgccaagggctactccgcgccgctggcgaggatctacgtcgacaacaccaacccgacgttcgtcgtcggcgagatctggagctcgctcatctacaacggcgacggcaagccgtcgaccaaccaggacgcggacaggcaggagctggtgaactgggtggagggcgtcggcaagccggcgacggcgttcgacttcaccaccaagggcatcctccaggccgccgtgcagggcgagctgtggaggctccacgacggcaacggcaaggcgcccggcctcatggggtggatgcccgatcaggccgtaaccttcgtcgacaaccacgacaccggctcgacccagtcgctctggccgttcccttccgacaaggtcatgcagggctacgcctacatcctcactcaccctggcatcccatgcatcttctacgaccatgtgttcgactggaacctgcagcacgagatcgcgacgctggctgaaatccggtcaaggaacgggatccatgcggagagcacgctggacatcctcaaggccgagggggacatctacgtcgccatgatcgacggcaaggtgatcaccaagctcgggccgaggtacgacgccggcgggatcatcccctccgacttccatgtcgtggcgcacggcaacgactactgcgtctgggagaaggaaggcctcagggttcctgccgataatatatatacgtacgtggctctagctatgaatcatgcaattttgctgcgagatgtgtacgagcgagcttcgatcgatgtacgcttcgttataactagcgttcttcggaaataa

SEQ ID NO: 632 - protein, 470 aa, Oryza sativa
MGKHHVTLCCVVFAVLCLASSLAQAQVLFQGFNWESWRKQGGWYNFLHEKVEEIASTGATHVWLPPPSHSVSPQGYMPGRLYDLDASKYGTEAELKSLIEAFHDKNVECLADIVINHRCADYKDSRGVYCVFEGGTPDGRLDWGPDMICSDDTQYSNGRGHRDTGAGFGAAPDIDHLNPRVQRELTDWLNWLRTDLGFDGWRLDFAKGYSAPLARIYVDNTNPTFVVGEIWSSLIYNGDGKPSTNQDADRQELVNWVEGVGKPATAFDFTTKGILQAAVQGELWRLHDGNGKAPGLMGWMPDQAVTFVDNHDTGSTQSLWPFPSDKVMQGYAYILTHPGIPCIFYDHVFDWNLQHEIATLAEIRSRNGIHAESTLDILKAEGDIYVAMIDGKVITKLGPRYDAGGIIPSDFHVVAHGNDYCVWEKEGLRVPADNIYTYVALAMNHAILLRDVYERASIDVRFVITSVLRK

SEQ ID NO: 633 - DNA, 1896 bp, Oryza sativa
  misc_feature (91)..(91): n = any nucleotide
atgggtggaggtggggtaggattggggttaggtgtaccagtaactaatgcgccgatgccgatgccaccgtcgctctccatcacttcggganggaggagccaggaggaagctttgcatttgggcgctgcactgtggcaacggataagcgcaatctgtgagaatacgtattgctgtggtggcaccacggtgaaggtggagtacggcgacgcggctatcgcggccgacgtggcgggcgctcatgtcatcagccacgccttcccgcacacctacggccagccgctggcgcatttcctcaggaagactgctgctgtgccggatgctaccgtcataacagagcaccctgttgtcagggttggtgttgtcttcagtgggaggcagtccccaggtgggcacaatgttatatggggactccatgatgctataaaggctcacaacgcaaacagcaagctcattggtttccttggaggaactgatggattgtttgcacagaaaactttggagatctccgatgaggtcctttcctcttataaaaatcaaggtggttatgatttgcttggacggacaagggatcagatcagaacaactgaacaagtgaatgctgcaatgactgcttgccaagccttgaagttggatgctcttgtaataattggaggtgttacatccaacacggatgctgctcagcttgctgagacttttgctgagtcaaagtgttcaacaaaggtagttggtgttcctgtaactctgaatggggaccttaagaaccagtttgttgagacaactgttggttttgataccatatgtaaggtgaattcgcagctcataagcaatgtctgcactgatgctctttctgctgagaagtattactactttgttcggctgatgggacggaaagcatctcatgtggctttggaatgtgctcttcaatcgcatccaaatatggttatactaggtgaggaggttgctgcatcaaaacttacaatttttgatatcacgaagcagatatgtgacgcagtccaggcaagggctgaaaaggacaaaaatcatggtgttgtacttattcctgagggacttgttgaaagtatccctgaattatatgctttgcttcaggaaattcatgggctacatgataaaggtgtttctgttgagaacatatcttctcatctttcgccttgggcttcagctctatttgaatttttgcctccatttattaggaaacagattgagactgagaaacttctagcccaattagttgaagcagaaatgaacaaacgtctgaaggaaggcacttacaaaggaaagaagttcaatgcaatttgtcacttctttggctaccaagccagaggtgccctaccctcaaagttcgactgtgattatgcttatgttcttgggcatgtatgctatcacatcttagctgctggcttaaatggctacatggccactgtgacaaatcttaggagtcctgtgaacaagtggaaatgcggtgctgctcctattacttccatgatgaccgtaaagcgatggtcacgaggaccagctgccagtcaaattgggaagcctgctgttcacatggcgagtatcgacttaaaaggaaaaccatatgagttgttgagacaaaactcttccagcttcttgatggaagacatctacagaaaccctggtcctctgcaatttgagggaccaggtggagagacaaagccgatttcattgtgtgtcgaagatcgagactacatggggaggatcaaacaattgcaggagtatttggagaaggtcaaaagtattgtgaagcctggatgctcccaggatgtcctgaaggcagcgttaagcgccatggcctctgtgacagagatgctaaccatcatgtcttctccctctttcagtggccaagcaaccatctga

SEQ ID NO: 634 - protein, 631 aa, Oryza sativa
MGGGGVGLGLGVPVTNAPMPMPPSLSITSGGRSQEEALHLGAALWQRISAICENTYCCGGTTVKVEYGDAAIAADVAGAHVISHAFPHTYGQPLAHFLRKTAAVPDATVITEHPVVRVGVVFSGRQSPGGHNVIWGLHDAIKAHNANSKLIGFLGGTDGLFAQKTLEISDEVLSSYKNQGGYDLLGRTRDQIRTTEQVNAAMTACQALKLDALVIIGGVTSNTDAAQLAETFAESKCSTKVVGVPVTLNGDLKNQFVETTVGFDTICKVNSQLISNVCTDALSAEKYYYFVRLMGRKASHVALECALQSHPNMVILGEEVAASKLTIFDITKQICDAVQARAEKDKNHGVVLIPEGLVESIPELYALLQEIHGLHDKGVSVENISSHLSPWASALFEFLPPFIRKQIETEKLLAQLVEAEMNKRLKEGTYKGKKFNAICHFFGYQARGALPSKFDCDYAYVLGHVCYHILAAGLNGYMATVTNLRSPVNKWKCGAAPITSMMTVKRWSRGPAASQIGKPAVHMASIDLKGKPYELLRQNSSSFLMEDIYRNPGPLQFEGPGGETKPISLCVEDRDYMGRIKQLQEYLEKVKSIVKPGCSQDVLKAALSAMASVTEMLTIMSSPSFSGQATI

SEQ ID NO: 635 - DNA, 2571 bp, Oryza sativa
  misc_feature (114)..(114): n = any nucleotide
atgggcgaatgtgtgcgtgatctcaccagcaagtccccgcctttggtgtgcttcacgtggtgtcctccatggcctcatggggcagcaaaatggctacagagagtgctcggccgnttgagtggaggaactggagcagggaagtggccaccaagcaaggacacgggttcctatgattctattccagctagcctttcagaagatgagttagcggagttggccttcatgccaaatagtggcggcatttttgggaagtggaggggttctgtcctggaacgcagtggaagcgctcctcctaccatggaaggttctttagttgcacttggtcacctcacaggtcaaccgagtggcaaccttggggccatactgccaaacttgggcactgaagctaacaattcagagtctaaggagaatatatattatgattcggcatgcgtcaaatactatatgtccaaggtgaatttgaacccaaggtttcctccaccactcgtttcaaggaaccagtttggcaagtctgaagaacgaaagccgttctcccttgatgacagcagcagcaggtccttacttcttggtcatcctactctgccaacacacaaggaagaacctgaggacgaaaagtcaccaagtttggattcaagttcagcagacgatgctcaatgtgattctgcccaaagcacatctaacttagggggccacagtccaaatcttgtagattcaattaaggaaaactttcatcggagcaatggtttgtatgataattcttccgatcttttaaatgcaaactctggtgatggagggtcgatttattctggcattagttcattgaagaattcctcactttatgttgtccagtcatcagacttgaatggatttccaccagatgctcatcagcgttcccctagacctattaggactccagtcagtacaaaacttactagcgacagtctgccagcttcatctcctcccacttcatcctgttctgactacagtactattactgaagcttgtcagcaaagaaatccaagcatggccgttaaacctggtgaaccagttggtaccatgcttgatagttcagacttcagtctgaagaatttgaatattagtccggatatcctaagtagttcatatgtcatgcaacagtggcagaaaaatgccccagtgtggaatggcctatcaaatgtagtccatggcgatcatgtgccaatgattcctccaggaattaatcttcctcaagttccatttgtggacaattccggttttggtcatatgaagttccctggtgatgttcaactgatgtcccagatcgggatggcaacacctttttgtacaccaaattcttttgggataccatgttatcctaatttgcagtcgcctagtgtttgggttcctccattcggaatcggcggctatggtttgcctggtccatttgtcccacctgttataactaacttcactcctcaacttcctggttttccttcagcagtaaatcttgctgcagcaactgacttatttcacccatataagatgtatgagcatcttggggtacctatgccatcccctgttcctgatcagagccttacgcattattttcaacagccccctatccatccgtatggtgttggaaatccatatgatacaatggtttcaagtaataattttgtagggaatcctgctggcgtttttggttcaccaatcattgacccatcagagcagaagtttcagataccggttactactgtagctgctaatgcctctactcccatcaaaggtggaaagcccattgggaattatgagactgcctcaccttactttggcgtaccgatgccttatccagcaggtccaacattacatgggcaacctgcttctggaacatctcctcgtgacaaaaggaacgatgtcaagggattccaaccccctcgaaaaaatatgcctgttagttccgagatacaaggtcagaaagggagggagaagtttgatgatcccaaggcacacttttctgttgaagaactaatatccagcagaactcatagggttgagctggctgacatcaaaggacagatagtgaaatacagctcggaccaaaatggtagccggttcattcagcagaaactggagaattgcaccattgaagaaaaggatttactttttgccgaggtccttcctcatgctttggaattgatgactgatgtattcggaaattatgttattcagaaggcccttgaagtaattgatcttgaacagaaaattgttcttgttggtgaactcgatggacatgtgctgcgatgtgttcatgaccaaaatgggaatcatgttgccaaactgtcaatgcatacatatggatgtcgtgttattcagagaatcctcgagcgttgcagcaataattctgaatgcctttgcataattgatgaaatcttgcagtctgcttgcatcctcgcacaagatcagtatgggaactatgttgtgcagcatgttttggagaaagggaatgaacatgaaaggggccaaatcatcactaaattggctgggcagtgcagagcgggaacttttggtcaaggagattctgaagcaaactga

SEQ ID NO: 636 - protein, 856 aa, Oryza sativa
MGECVRDLTSKSPPLVCFTWCPPWPHGAAKWLQRVLGRLSGGTGAGKWPPSKDTGSYDSIPASLSEDELAELAFMPNSGGIFGKWRGSVLERSGSAPPTMEGSLVALGHLTGQPSGNLGAILPNLGTEANNSESKENIYYDSACVKYYMSKVNLNPRFPPPLVSRNQFGKSEERKPFSLDDSSSRSLLLGHPTLPTHKEEPEDEKSPSLDSSSADDAQCDSAQSTSNLGGHSPNLVDSIKENFHRSNGLYDNSSDLLNANSGDGGSIYSGISSLKNSSLYVVQSSDLNGFPPDAHQRSPRPIRTPVSTKLTSDSLPASSPPTSSCSDYSTITEACQQRNPSMAVKPGEPVGTMLDSSDFSLKNLNISPDILSSSYVMQQWQKNAPVWNGLSNVVHGDHVPMIPPGINLPQVPFVDNSGFGHMKFPGDVQLMSQIGMATPFCTPNSFGIPCYPNLQSPSVWVPPFGIGGYGLPGPFVPPVITNFTPQLPGFPSAVNLAAATDLFHPYKMYEHLGVPMPSPVPDQSLTHYFQQPPIHPYGVGNPYDTMVSSNNFVGNPAGVFGSPIIDPSEQKFQIPVTTVAANASTPIKGGKPIGNYETASPYFGVPMPYPAGPTLHGQPASGTSPRDKRNDVKGFQPPRKNMPVSSEIQGQKGREKFDDPKAHFSVEELISSRTHRVELADIKGQIVKYSSDQNGSRFIQQKLENCTIEEKDLLFAEVLPHALELMTDVFGNYVIQKALEVIDLEQKIVLVGELDGHVLRCVHDQNGNHVAKLSMHTYGCRVIQRILERCSNNSECLCIIDEILQSACILAQDQYGNYVVQHVLEKGNEHERGQIITKLAGQCRAGTFGQGDSEAN

SEQ ID NO: 637 - DNA, 759 bp, Oryza sativa
atggcgatgacaccgcagctagcattttctcgcatgcctccagggtttcggttccagccgacggacgagcagcttgtcgtcgactacttgcagaggcgtaccgctgcgcagccatgcgttactcccgacatcaccgatatcgacgtttacaacgtcgacccgtggcagcttccagccatggcgatgtatggatcggatcatgaccggtacttcttcacgatggcggcccgagaggcgcaggccagacgaacgacaccgtcgggtttctggaagcccaccggcacaaagaagacgatcttcgtcgtcgccggtgggcatgaggtgcccaccgccgtcaagaggaggttcgtcttctacctcggccaccaccaaccatcgggcagcaacaacaacaacaaaacatcatggatcatgcatgagtaccgtctcatgaactctccaagagcggcagtgccgtcgtcttcttcggtgaatcgtcttcccactgatgatctcacggaagagatggtgctgtgtaggatctccaacaaggacctgcctaaaccacccttcatccacaacagcttgttgcagttctcttcagtggggttgaatggtgatgggtataattacttgatccttgatcaccttgagcctccagcaatggagtatcctaatgttggcattggtaatgttgatgatgctgctgctggtactgatgatccgggtgaccttgatgaggagattgatgatagcatgcaaagaaaccatggtggctag

SEQ ID NO: 638 - protein, 252 aa, Oryza sativa
MAMTPQLAFSRMPPGFRFQPTDEQLVVDYLQRRTAAQPCVTPDITDIDVYNVDPWQLPAMAMYGSDHDRYFFTMAAREAQARRTTPSGFWKPTGTKKTIFVVAGGHEVPTAVKRRFVFYLGHHQPSGSNNNNKTSWIMHEYRLMNSPRAAVPSSSSVNRLPTDDLTEEMVLCRISNKDLPKPPFIHNSLLQFSSVGLNGDGYNYLILDHLEPPAMEYPNVGIGNVDDAAAGTDDPGDLDEEIDDSMQRNHGG

SEQ ID NO: 639 - DNA, 2193 bp, Oryza sativa
  misc_feature (24)..(24): n = any nucleotide
atgcaggagtggttgatggtggcngtggctaggagagttccgaagtactttgatgatccaatacaggaaatttttctcgaagaaattatagaggatgtctactacatgacaaaagaacaatacgctaacaatgttgtgcagcacattttgcagcatgggaaagcccttgtgcgatctttaattataaagagatttattgggaaagttgtgaccatgagcaagcaaaagtacgcttctaatgtctttgaaaagtgcttggtcttcagtagctatgatgaaacccagaagattattaatgaggtcctaaccatagccaaggttatcttcttcgtcgagaattacttcaagggtggaataactaggcttaagaggcacttggctggagttagagggcagagtgtttattgcacacaagttcctgatgatgttaaggagaaggttaaagcaatgctggatgcacatggtgaaaagaagagtgcaaaattggatagccagcttcgattgaggcaacaggttaatatcaatggaaatgatgatgaggaaatggaagaagtaggagaagttgaagttcaagaagctccatcagctgcaggaagcacactagtccgtaagaagccccgaaacaagggaccattggacagctattgcatgcgccctgaggaacctcgtgctaagggaaagcatatacaaactacaatgagtaaacactgtaaggaatatttggaagtgcaaaaggagtcatggtcttctactggatgttctattatcgcaaatgcttggacagatcggcgtggaagaagcttaatgaatttggttgctcactgtgctagaggtatgtgtttcattgatgccattgatgcttccttggaggttcacgatgggaagtacatctacagcttggtggtcactgacaatgcttcaaataatatgtctgcatcaaagatgcttcaagtgaaacatcctcacatattctggacctcatgtgctgcccactatattgatctcatgctagaggatattggtaagataactatggtacataacattattcgagatggaaagtctatcacaaatttactctatgcacaagttagattgctggccattatgcgtcaatttacgaaaggtgacttagttcgagctggtactactcgatttgccactagttacttgaacttgaaaagtctttatgataaaagaaatgaattgaagcaattgtttgcatcacaagattgggctaaaagttcctgggctaaaaagattaaaggacagaatgcacacaacttggtcatgaacaacaagttctggtcacaaatgctagaggttataaattattttgagccacttgcatatgtacttaggagggtggatggtgatgttccagcaatgggatacatttatggtgatcttatcaaagcaaagaaggacgttgcagcatgcctaaatggaaatgagaagaaatatagtcatatttggaaaatcatagatgcaagatgggacagcaagctcaagactacattgcacaaagctgggtatttcttgaatccgtgcttcttctatgagaataagagagaaatcaaggaagatttcctgatgcaagcagttgtagaatgtgcaacctgcatgtatcgtgatgatattacagtgcaagatatttgtgtagctcagcttagcctgtacactgaagccatggattcttttggaacaacaatggctattagacaaagaaatagtccaacaatcaccccagtttcatttgcatgcgaaagaaattggagtgcatttgagagagtccattctaagaaaagaactagattaggccaccgaaaattgaatgctctggtctttgtcatgttcaacaagaggctgaaatcaaaatattctcaaaaggatagggatccattagttgctaaatttatagatgatgatccaccaaatgaatggattatagatgatgatgcacctgcacaacaaccagaagttgatgctcagagtgcagctgtcagtcgaaagagaagattaatacataaaaaatcatcaagtaaagcaaagaaagcatgcgttgtggtcgaagaggaggaggaagaatttcaatcttctaacagtgaacatgaagaggaggaaaatattccttatgcagatggttcaagtgaccatgagcttgatgacgttggtgagaatgacaacgaatga

SEQ ID NO: 640 - protein, 730 aa, Oryza sativa
MQEWLMVAVARRVPKYFDDPIQEIFLEEIIEDVYYMTKEQYANNVVQHILQHGKALVRSLIIKRFIGKVVTMSKQKYASNVFEKCLVFSSYDETQKIINEVLTIAKVIFFVENYFKGGITRLKRHLAGVRGQSVYCTQVPDDVKEKVKAMLDAHGEKKSAKLDSQLRLRQQVNINGNDDEEMEEVGEVEVQEAPSAAGSTLVRKKPRNKGPLDSYCMRPEEPRAKGKHIQTTMSKHCKEYLEVQKESWSSTGCSIIANAWTDRRGRSLMNLVAHCARGMCFIDAIDASLEVHDGKYIYSLVVTDNASNNMSASKMLQVKHPHIFWTSCAAHYIDLMLEDIGKITMVHNIIRDGKSITNLLYAQVRLLAIMRQFTKGDLVRAGTTRFATSYLNLKSLYDKRNELKQLFASQDWAKSSWAKKIKGQNAHNLVMNNKFWSQMLEVINYFEPLAYVLRRVDGDVPAMGYIYGDLIKAKKDVAACLNGNEKKYSHIWKIIDARWDSKLKTTLHKAGYFLNPCFFYENKREIKEDFLMQAVVECATCMYRDDITVQDICVAQLSLYTEAMDSFGTTMAIRQRNSPTITPVSFACERNWSAFERVHSKKRTRLGHRKLNALVFVMFNKRLKSKYSQKDRDPLVAKFIDDDPPNEWIIDDDAPAQQPEVDAQSAAVSRKRRLIHKKSSSKAKKACVVVEEEEEEFQSSNSEHEEEENIPYADGSSDHELDDVGENDNE

SEQ ID NO: 641 - DNA, 738 bp, Oryza sativa
atgtctcccacatcttcggcggatccacgttgtactcctctaagagggagtacaagaaagcggaacgcgaagtctgctccacctcacgacgactactaccaagatgaagtggtcccaacacaagatcgagttctcggaagcggatcatcccaagatcgcgaacccaccattcggaacataaaggtggtgagagttctcatcgacggcgggagctcaatcaatctgctcttcgctagcactttagacgcggtgggaatacctcgaagcgagctgacgcccacacatcagcccttccatggaatcacccccgagtcgtcgtctaaacaattgggaaaaatcacgctacctgtcaccttcggacacgccgaaaacttccgaacaaagcagatcacctttgatgtcgcagagttcgataccgcatacaatgccatcattgggagaactgcactcgcgaagttcatggcggcatcgcattacacataccaagtgctaaaaatgccaggaccaaaagggacaatcactatcctggctaacaccaagttggcggtacagtgcgacaagcggagccttgacatagtcgagcatactctcaacccgcccgccacagccgagaaccccaagaaagtgagcaagcccaagaagactccaaaaccagatggtgcaatcaagataatcccgttgtcaagctccaaccccgacaaaaccgtcaagatcagggcatcactggaggacaaatag

SEQ ID NO: 642 - protein, 245 aa, Oryza sativa
MSPTSSADPRCTPLRGSTRKRNAKSAPPHDDYYQDEVVPTQDRVLGSGSSQDREPTIRNIKVVRVLIDGGSSINLLFASTLDAVGIPRSELTPTHQPFHGITPESSSKQLGKITLPVTFGHAENFRTKQITFDVAEFDTAYNAIIGRTALAKFMAASHYTYQVLKMPGPKGTITILANTKLAVQCDKRSLDIVEHTLNPPATAENPKKVSKPKKTPKPDGAIKIIPLSSSNPDKTVKIRASLEDK

SEQ ID NO: 643 - DNA, 2198 bp, Oryza sativa
  misc_feature (36)..(36): n = any nucleotide
  misc_feature (43)..(43): n = any nucleotide
  misc_feature (59)..(59): n = any nucleotide
  misc_feature (87)..(87): n = any nucleotide
  misc_feature (149)..(149): n = any nucleotide
  misc_feature (212)..(212): n = any nucleotide
  misc_feature (243)..(243): n = any nucleotide
tacatgtttgtttactttttatgtattgtttatttngtttttnttagtctttttcttcnttttgcgtgttagcttgtcgtttccgtngttgcgaaggttcgtgagtgcgccggaagtattcaagaagattaattgaagaccgattattncaaggcaagtcacacagatcctaaacacaatcctttgagcatgttgatcctatatttaaattntctatttatttcaactgtgcatttattttcnaatgtcactgggtggtgtgaatctattcctttgttatggcctgtttgcattgattactttattccttgataccttgggttattataacttgactagttgagctatatatattggttcagctagatattagatatgattgcttagccatgcttagaaacattagcacactattgggattacttatgactcattattatttaatgatggcttaatgatagttcacgatggtcaatcgtgattggttaattaattacttgccaactaaaacttgataatggtgggttgtgagcacatggttttgagagtcgtgctcatgacaattaaggaccggttcgcgagctactgttgtgaaacattaaccatgccaaccacaagccagcgtgggcaacggctttaccttttgtataacatggttcattgcggagcactagactgagaagtggcggagataagcccacgggggtcgctggggagtccatgccttgttttataagggggtgattatgatccaggaaaggtgcgctatggtggattgtgttgtgcaaggggtattgtcacagctccttttcgaggtaccgtggtggtattgagggacatggtgatatgatgtggggctgtgtcttgtgggtacagtggtacacctctgatcagagtaaaactattcgaatagccgtgcccgcggttatgggcgggttgagcaatgtttttcgtgattagtctcacacctctcacaataattatagatgttatacctggtaataatttgcttagctcctggtttggagttagatctgtacagccgggtatggttgttcaggatggttgggcctgtgcagcatgggtgtgttgttcagtgttgattaaaatttctgattaattactccactgttttatttctcttaaatgttttgctaaatgctgcttttgcaaatgagcctatattatgccatcctttggtatccttgtgcacttgcatatttgctgtgtggcttgttgagtatgtcatatgctcattcttgcaataatcaatcaacctcagttgaagaaaaaagatctaggaggagaagacgtttggcttataccccagttgagctgcctgtgggagtggagccggagcttcgctagattttattttccgctgcagttttcttcatggtgaggactaagtgcatcttaagtaagtatttatcgttttagttaatttgatgaatttgtatattaaattgtcagtttgtgtacctcggctgattcctggacgaggattttatgcacaaataagttcggaaattactagtgaattttcgggcgtgacagtagtactcagtcttgctctcttttccctcgcaccagagttgaagttcttctcagttggagccgtctcagagaggttggtttcgtcgctgccgtcaaggtttgcctgtggagtggagtcgcccgctgctgaagtcaagcttcccggtttagctcgcttttatctttcccgctgtatttgtaatcttttatatttttgtaaggcgtgggtctgtatgtcaacaattgttgtttgtgtaccctggctggtcctggacagggatttaatgcacattcagcttagaaattcgggttcgagaatttctgggtgtgacaccatgtcacactgagatataaagtgagtgaggagtcataacattatctatcttgccaaccatcaagtatctgtgatgggcaataaagttactttgacgatggtatacaaggacatctgtggaggcacatcacgtaacttccaaatgacatgactcactctgatcccaatagaatatccaacaaaaacaaacactctagagcaaccgataaggaattcaaagaaaacccatccatcgcatctataaatagacaagcacaatgtaaacccacttcatcattctcacaactcaaacattacagcaaaagcataagaactagaaacccaccac

SEQ ID NO: 644 - DNA, 2199 bp, Oryza sativa
  misc_feature (609)..(609): n = any nucleotide
  misc_feature (1816)..(1816): n = any nucleotide
  misc_feature (1989)..(1989): r = adenine or guanine
  misc_feature (1991)..(1992): n = any nucleotide
  misc_feature (2020)..(2020): n = any nucleotide
  misc_feature (2076)..(2076): n = any nucleotide
ggcaaagacgtcatcggcttagaatcattatcggctgcagcatctcggaatcagccgatgggagttatcaagtcgccaatagtcggattcctgctatattcggttaaggaaatcaatctattaaaggaagcttatccctaagtgaccgagtttaaagaggatgcggcgtggcaagttatctattaattagaaatagtttgttagtttccttttatctttaggaaagtgtgtttagtgtccaataaggactttatgttttccttttatctttaggttagtttctttcttgtccgacaaggacttgtatcaacccacgggtataaatatgtacacccggggcctatgtaatctatcctcacgatcaatacaattcgtcgcattgccaccccttttaccttttctactttattttattgtccggcgggacttggcacctgacgcggggctgcatcgatgttcgatctccagcgaaggggtaagtccaatgttccgtcggcccaagcaattgtctcatctatatcggcgtcgttcaaggctgcatcagtacattcgacctcttggattgctctggtttcgatgatatatttgcctacctatttatcatatgtntctgttaatctagtcttagcatatcaatttagctctatcggttgcttctcgttttagggtttctgccggtatcggctaaatcgtgttgctagattagattagcttagacatctaccactctgaaaacttagtcaacggcttgattgtctagatattatgtttcttttcatacttagtgctgcatcagttgagtttgatctactaagtcgtgtttagaaccataatctctagcctgctttttgactgccaataagggtttcatcggggtttgagccgatgagttatctggacgttgcatcggctcataatgattgtatatacatataagttggatttagccgatgacaacagaggtttcactgtttaatataatcttgtggatttcatgacatcggacctccagccgatatatgctttaaccttcggatcgatgcttatttatcatatcaatgctagccgattggtttatactggactatattattgttatattttattatcagtagccgattgcctatataacattatttactaaagtgttagaatctacattggacatatagccgattgctctaaaccctatcgctatcggctggtatcagcatcggctattattggcgattagctataactactccatcggcttgttagccgatcggctgttttgatctactatttgcatatcttgttagttgcaggatcaaattgactggaacgcccacatctcatcaagatttgtacctgcacaggagctaagcagatctcccaggtcagtgtgcgattttttcgtcaacaaaaaggcatctttgccctaatcttaataaaaaccaattttctaatggtattcgtctaatctgtcagttcaatagcaagtataatgggtttcaaccgtttttgatggagatatgcaattacacattgggcctgttgagattgttgcaattttaagacataacattgttcggtaaaattgacaaatatattattgcattgaaaattttggcaacaacacataatcctaatttaccaaattgacaatattactaacttgattttaacagtaatctgaacaaccctttatttgtgatggcaaatccacgaaaccggttcaaactaatgccaaactaggagtatctaattgggccgattaaaaaagtaggtccacatgtcagctgccggggaggccacgcccagtaaacgggtcccnaccagccgcgagcggggagccacgccacccaaccaatcccaccacttcacgccgtgggacgatctccgccgtcggatcgatcccacggacggccgcaactcccccagcacagagaccaccgcgattggttggggcatccacgtgtcgtgctcggactggtcaggtcagactcrtnncgtcccggccaacgcgacgggggcgcanctagatctcggcccgttcaagtcatctccccttataaatcgcccacgaacccatanaactcaaactcacttgaaggttttcggatcgcaacccaaactcgcacaagggagaagagaagagaagcttcgagagagaggtggaggaggagacgagcgcgtggtggtggtggtgttggcggc

SEQ ID NO: 645 - DNA, 2199 bp, Oryza sativa
  misc_feature (7)..(7): n = any nucleotide
  misc_feature (9)..(9): n = any nucleotide
  misc_feature (11)..(11): n = any nucleotide
  misc_feature (92)..(95): n = any nucleotide
  misc_feature (274)..(278): n = any nucleotide
  misc_feature (281)..(281): n = any nucleotide
  misc_feature (284)..(288): n = any nucleotide
  misc_feature (293)..(293): n = any nucleotide
  misc_feature (324)..(326): n = any nucleotide
  misc_feature (344)..(346): n = any nucleotide
  misc_feature (350)..(352): n = any nucleotide
  misc_feature (2080)..(2082): n = any nucleotide
aataaangntntagatcttgatgagttatacaactttgttgttgatgacttttcgactaaagttatttactgcttcaaaatattatttgaannnntgaaattcaaatttttaatttataaaacgaagtcacaaggaaaaatggccaaaataatagcaaaagaacacaataacatgatagagtatgattttagaaacatttaggaaaaagaatcatccaatttagagttcatacgagtgagataaactagtttcaaatttttaaattttcaaatnnnnnttncannnnnggctncttaagacgcccgtatggaaaaatagatttnnntatgcgggtacttaagtnnnccannngcaaaaatgagctcatttttgcatgcggacctcttaagtgacccgcatggaaaaatcagtttttccatacgggcgtcttaagaagccgtatgcaaaaatgaaggtcgatttttgcatacgccatcacttatggtctgtttgcaaaaattcatgaagtctagtatagaaaaatcgtttgtgtattagtgtattgcaaaacctgaaggtcccctctataatcttattttgtaacgaagggagtagcttgttactagctagcactagccagccgactaattaattttcacatccacgattgctgcgtctccatatatctgatgacaataataagtaataaaaagtggaatggacgatgttcctctcttctattattttgttcttgaaattcccctttttttgtaatgttcttagtaatttctattacgtggcttgttaattgtgaaagcggggactagtttcatgacctgtcaaaaagcatcccctttgccacccttgtagcagcacagtccatttcagatcttatcaagttcgccttggcctctctggtccaactgcttcttggacattctgttctttttcatgacgtctgtaaaagccatacacaataactttgtcatatactgcatgccagcaaaaaaataaattacaacgaagtatacatatagaaaaaatggctgcgatgactacacaaatatgtcaattgtgaaagcgtgaacaaaatataagtaaagctattgatatatatgttacttcccgttcatggaaaaatgctgttttggataggaggcaacaaaatcttgatttctttttaactcactaatatacacaaaaataaaatatgaatatttattattgttatatttaactgtcttttattaatataattatcaatacgaatgacaaaaacctatgaactggtgagaattaatgtgtcgagatggtacgtatgacgagtaaaaaaggaatacaatgagttgtttattttgcaataattaagatcatcgatcagataaaacaaatacactttgaaggacattaaactcacacccaagctaacaaccctcttgttttattttgtttcctttctcacaaaataacaaactctttcttgcccctcacttaagacctatattttgatatcccttatactttctttaaaaaaagggctggcacaaactgcaactcgacaggattatagcacaaattatttgtagcctttaatttgtatcattttttcacaaagtgattttgcgtacgtgcttcttctagccatatataatgccgtgccttgttaatataacctgttatccaatgtgcgcattaaagctatctatatatgaaatttgtgtttcagataactccaatatatatatgcttgatcaggcacgtctactgttgcagcttccagaggcattacttttaaaatatttgtttggaactattgtttttcttgttcaacaatttggatcaccatataagccatggaactaaagatcaacagattttgttaccatgcataactatgcgtcgcgtctgttgacaatgtgtgcattaattcaatttcttgcacggaagaatcaaaataagttgaaataattaaagagtgtggtgcatatcaatcccctttaaccaacttttatccgtgtgatgccagattaggcgtacgaataacaacaaaattttcattcaaaaccacaagctaatccctcatgaacagccaaaaaaaannntctccatttcctgaaccactttagtctttatagctatatataaaaccacccatagatgggagagcttctatccctctcatacaaattaacaatcaagaatttctgcaaacaaaaaaa

SEQ ID NO: 646 - DNA, 2199 bp, Oryza sativa
  misc_feature (339)..(339): n = any nucleotide
  misc_feature (783)..(783): n = any nucleotide
  misc_feature (1317)..(1317): w = adenine or thymine
  misc_feature (1318)..(1318): n = any nucleotide
  misc_feature (1923)..(1923): r = adenine or guanine
  misc_feature (1924)..(1924): n = any nucleotide
ttggctaatgcacttgcattcctaagaaccaccaaaatggaaaaaaaaaataactggatgacaggataataagagaaattgattaaaagtcttacattcaagaaagggaataagatcaagcagttgagtgtcatcattttcaagcttccaaggtttgatctcaacacaattttcaggctgcaggcatgattccagagcatgcccactgatataaatgacttgtgcgggatttctgtttagctttgataaatcctgtaaatgacaacataacataaaagacacaaaaaaaaagttatatgctgcaaaaatacagctgcccaggtgttttaattacaaaanaataatattgcctcgtactccctccgtttcacaatgtaagtcattctagcatttcccacattcattaacatcaatatgaatgtaggaaatgctagaatgacttacattgtgaaacggaggaagtagattatactacctacatccctaaaagatagtcttcttggttatgatactttagttttaagaaaacaaatccaagttcaaattcaaagtaggatttgtcaaggaaaaaagaacacctaactgtcagcaaactgttcggtgagcagcttatcagcacttagataaacaacatggtccatggttgatttctatggtggaaataagcgcaaaacaaaagcaccataatcaagagtaggctgcaagctgatcctattcaccgtgcccatcataaatggaaatagttaaacagcttagaaaataaatgcctgtgtaatagctaanaatgaccaatacatgtcaagctcaaggaaggaaaccttatactgcaaatttccaaaagtttaaaagcattaaaggccattgaagaaattgtagatacagggtgatccagactttggacttacactgttaactttaagtaacagtcatgagcaatagaacatgcaatgatatttaccccagccaaataatgctaccagctactagttcacaccttatgtaaagtatttgttgcaagaaaagtctaagatgacagcaacctgctgagaagaacaactgacgatgtcataaggagagggagcttttcgataggtgccgtgcagttcaaagagttagttagcagtaggatgaagatttttgcacatggcaatgagaagttaattatggtgtaggcaacccaaatgaaacaccaaaatatgcacaagacagtttgttgtattctgtagtacagaataaactaaagtaatgaaagaagatggtgttagaaaatgaaacaatattatgagtaatgtgtgagcattatgggaccacgaaatwnaaaaagaacatttttatgagcagtgtgttctcaatgagccttgaatgttatcacccaggataagaaacccttaagcaatgaaacatgcaagcgtttaatgtgcaaagttggcattctccacgacataatgcaaaagaagatataatctatgacatagcaagtcatgcatcatttcatgcctctgtcaacctattcatttctagtcatctaggtaagtatcttaagctaaagtgttagaacttcccatacataagtcataactgatgacaattgggtgtaacacatgacaaaccagagagtcaagcaagataaagcaaaaggatgtgtacataaaactacagagctatatgtcatgttgcgaaaagaggagagcttataagacaagccatgactcaaaaaaaattcacatgcctactgtggcccatatatcatgcaacaatccaaaaactcacaggtctcggtgttgatcgtgtcaacatgtgaccaccctaaaaactcttcactaaatattaaagtattgctagaacagagcttcaagatataagtcatgatcaccaacaaccatgttcaaaaagaaatagaaagctatggcacagcaacaaaarncaaaagcatgcatggatataatctttaacatcatccatgtcatattgcaaaagaaagaaagagagaacaatacaaatgatgtgtcaattacacatccatcattatccatccaccttccgtgtaccacacttcatatatcatgagtcacttcatgtctggacattaacaaactctatcttaacattcaaatgcatgagactttatctcactataaatgcacaatgatttagcattgtttctcacaaaaccattcaagttcattagtactacaacaa

SEQ ID NO: 647 - DNA, 2155 bp, Oryza sativa
  misc_feature (129)..(129): n = any nucleotide
  misc_feature (326)..(327): n = any nucleotide
  misc_feature (1414)..(1414): n = any nucleotide
  misc_feature (1443)..(1446): n = any nucleotide
  misc_feature (1448)..(1448): n = any nucleotide
  misc_feature (1450)..(1450): n = any nucleotide
  misc_feature (1454)..(1455): n = any nucleotide
  misc_feature (1458)..(1459): n = any nucleotide
  misc_feature (1461)..(1463): n = any nucleotide
  misc_feature (1635)..(1635): n = any nucleotide
  misc_feature (2066)..(2073): n = any nucleotide
  misc_feature (2075)..(2075): n = any nucleotide
  misc_feature (2083)..(2088): n = any nucleotide
  misc_feature (2102)..(2102): n = any nucleotide
  misc_feature (2108)..(2108): n = any nucleotide
  misc_feature (2120)..(2120): n = any nucleotide
  misc_feature (2124)..(2155): n = any nucleotide
ggcgtgccgtgcgaaaactcgccgggaatgaaaaggttggtaggccggagaggcggacgacgtcaccagccgcaaccgacggcgcgggccgcacggctgctgtccaaatcgtcggccgaatctcccgcnggcgccgacgtggacgtgccgcttcgggcaccgaaagttcttttgggcggccaggtcggaagccttttctagttttccggggggacccctttctgctgtcccggctctccaattccggcgatggacgagtcccgcacgcgtccatctgtgcgagtttgcgagccagcaccaccacccaacgtgtccactcacggctnncacgtgccaagcccatcaggccgcagccgtcgctacgtggccgcgctcatctttccgcccgtattacacgtacgcagtcgcacagcagcttcattactgatctgcaaaataacgtaacgcaaaatcaatcaaatctgcctcgacttttttttttcagtctttcagaaaatcgaaacccccgttagagcaggtacagtagcaccataaatcaactataaacatatttttaagagataaaataaaatataagagtagcggactacagatctgcagcatgaaatccaagacgtaatgtgtgtatgacaggtaggactagatattaatagtgtaataagtattattgtatgaattagctattatattgactataaataatttaaagatagtagttgactatactattaaacttcctcttactcgtattttcaacaaattctgtttaagaaaggaagatcgcaaatttgtggatcgcgagggatacggtagtagattgcggggggcaaggagcaaaaatcacgagtccccaaaacgtcgcacgcggtaagccgccgttttatacggggcggcgtactttgccttgagatggacgcgtataagccggcgcctcgcgttttcttcgtccgtccaccgacccagcagtgcacctcccgttcgcctcgctcgcgagctcgcgttactttacaccgccgccgccgagctctccagactccggaggaggaagcgatcgttacacgtacgcctcgtcaagcagaagcaggtgatcctccgccccttccgatcccctcggtcctccgagctgttcgatctgagaagaaaaaaaagaaaaatctgctggattatactttgcttgctctaggattaattcatcgccttattatggttgatgattttatttccttcgtaattactgcgtatgtttttctctcggctgtacccgatggaattttggtagttggtttggtggtgtcctggtgatcccctttggaacaatcgaacataattcttcaggtttatcgtgttgtatttagtaactgttcgtgccagtaagtactgtgtagtgattgtgattagtgatatttgctcatgnatacagtttagccgtcgtggggcatcatnnnntncncgtnnttnngnnnaatcagcgtggtttagagaaatcagctgtagcttttgcttttgtagagcttaccccttttttttttgaacgaaacgagcttaccccttatcagttatcaccgtggctgtgaagctacaatttctttccctgcccttttattattagtgttatgataaattgattgatgttgngatagttcttgtgatgtgtcctgatttgaactctgcgtgtaagctgtgacatgtgtcccctatttttttccgcacctcatcaaactggataggttcaggataaactatgtattattaaaaacgccaccaaaacaagttgatgctttggtttgctgctcggatgtaatgtgaacttcccaaaatcttaatacaaagatgcgcaactcttttgcgcattctcgaaagaaaaaaaaaacgccattgaaacaagttgatgcttggtatagttaatgtgcttatactctgttgtgcaatgtagtgaatatactagttagctgaaaattgcatgatatactttcaaccttgatgcttcaattaaatatattccaatctgctgggcaccgatgatttttttttaaaagattgtactctggacatctcaagcagtatannnnnnnncntgtagtgnnnnnnttattagtttactnggtttngcccagcgactnctannnnnnnnnnnnnnnnnnnnnnnnnnnnnnnn

SEQ ID NO: 648 - DNA, 2198 bp, Oryza sativa
  misc_feature (781)..(781): n = any nucleotide
gttggtagcaagaatctgttttaaattgatatgtggctcttgggagcagccagactcggggagtcctcttatttgtttggcaaggagccacccatgcagatgcattaaatgaatacacttcactgctttggtcatgtgagatgcatcttctcacttgtgtagttgagaaccactcacttagtcgtttcaaaacctttatagaaaaaaaaaatctaaacatggaaataaccagcctttctctgaagcttgcattaaacacctaattcacatggtttgttgagtactagtatactcacccttgctctatataaatacaccccccaggcacaatttctcgatgaagaggagatggatccagctgatgagttcttccaggaacaagcaggcttcgagcggtattagggttttggcttagttccaaagtcatgcttgtggctttgtctagtctccgcttctgcctttttgtaatgcagttgtgaactcgggggttgttcgcagttccaacaatgattgtatccctactcataataacgaaacccatgtcgctgtgatattctatcttcctttgtactagctctatttcctgggactggtacatgctcacaagttaatatgaatctccttacattggttttcatttggagctagtttggggcgtgacacatggtatgctagaagaatatttctttggctaaaatttgcattcaccatacttgtgatatttttttaaaataagttcatcttagatggtcactgtaaatatataaatctagatggaganagttgcgaatatatgtgacatattttcggtgctatggaagatattttattagggaaagattataagtacataacttttcaaacaaaactcttgtgataaaagtgtgtgtggcacactatgaaccagcctagttttactgtaactaatttatactcccatcgttttttaatatacaatgtcattgacttttttacatacgtttgaccgttcgtcatcgaacataaaagatataagtccatgcttaaaaaaattaataaaaaagtcacaacaaaataaataacaattacataattttttaaataatattaattgtcaaacggatattaaaaagtcagcaatcttatatatattaaaaaaacgaatgtagtacttgtgttccttttgatcttaacggttggtttatgggataaatacatttattccattaggttcctacatatgtcccaaaggatatctaatcccttaattaactctgcctactggtggccttatggttccatgttgaatgccccgtgcaccaatgcccatgcctacgagcataaaacgttaaaaaaattaagattgaaatataaatcaaatatatattagaggcatccataagtatgaggaatttttatgtactaccccatctatgaattcagggacaactcagctttcagacaacattaggaatagataattaaacaaaaacatatctaccatcaaatgaaaagaacattcttcagcaaaatataaaatataatcaagtattttactattataatccaaataaattgattcaaaatagttttaaaaaaatcaataggcaagttatatagtcaataaactgtaagaaggcttatgacatggaaaaattacatacaccaatatgctttattgtccggtatattttacaagacaacaaagttataagtatgtcatttaaaaatacaagttacttatcaattgtcaagtaaatgaaaacaaacctacaaatttgttattttgaaggaacacctaaattatcaaatatagcttgccatgcaaaaatgacaacatgcttacaagttattatcatcttaaagttagactcatcttctcaagcataagagctttatggtgcgaaaataaatataatgacaaggcaaagatacatattaagagtatggatagacatttctttaacaaactccatttgtattacaccaaaagcaccagaagtttgtcatggctgagtcatgaaatgtatagttcaatcttgcaaagttgcctttccttttgtacagttttaacactacaagccatatattgtctgtacgtgcaacaaactatatcaccatgtatcccaagatgcttttttattgctatataaactagcttggtctgtctttgaactcacatcaattagcttaagtttccataagcaagtacaaatagc

SEQ ID NO: 649 - DNA, 2199 bp, Oryza sativa
  misc_feature (53)..(53): n = any nucleotide
  misc_feature (57)..(57): n = any nucleotide
  misc_feature (832)..(832): n = any nucleotide
  misc_feature (1148)..(1148): n = any nucleotide
  misc_feature (1150)..(1150): n = any nucleotide
  misc_feature (1155)..(1155): n = any nucleotide
  misc_feature (1159)..(1159): n = any nucleotide
  misc_feature (1163)..(1163): n = any nucleotide
  misc_feature (1171)..(1172): n = any nucleotide
  misc_feature (1207)..(1207): n = any nucleotide
  misc_feature (1208)..(1208): y = cytosine or thymine
  misc_feature (1209)..(1209): n = any nucleotide
  misc_feature (1210)..(1210): k = guanine or thymine
  misc_feature (1211)..(1211): n = any nucleotide
  misc_feature (1212)..(1212): y = cytosine or thymine
  misc_feature (1213)..(1213): n = any nucleotide
tataagataaataattaaatatgttaaaaaaaatcaatggcgtcaaatatttnaggncggagggattataatttaagggtgaagcggctatagagaggtctggaaataagccgtacccaccggcaccaccggtggtaggagcgaggtagcacttcccttggtttgacatttttccactagaacttatatatgttaaaatactggttcccccttcgaaaaagttaaaatactagtgaacatcagaacatgttttagacaaactagataattttaagggtttgttttggttgcagggcaatgacatgacaactaaatagaagagtaatttaggtagaattcgcgggctgggctacgaccggtaaactgttttacatatgtataggtcataagtgagatggcatgcatgatgtagctaggatattttgttttcctatcaaacagatagatatcattgtctacatatttgttgttgactcatataatatcaaacaggaatgataggttcatacgcaggtaaaattgacgaaaatatgcatcgtcatctcgagtggagaaaaacaaacacatgcatatatgtacatgtcgccatcgaacccctgctataatctaatcttcttgcttttctcagtacacgcacgcaactactatctaggaatcggcagctttaatttactgatgccatcataccgatcgataattataagtactccctttttaagcctttcctagctactagtatatgtctatatatcgtacgttattttgtcatatatatactctgaactttttctaagaaacaagctaaaaaatctagctagctttttaaaatttnttgtgtgtgctgaatgaaaataatcacttcaatgtgaatgaagggataaacacggcatgcatatgacatatattatatattcagatttgattcggccgatttttcggactttaaaccgccggtggatatatatgagtcgtagtacatgtttcttttttcaatcgatcaattaaatttgtccgtgtgaatgaattgatcatgtattgagcgatgtgttgatcaagatcaattagcaatcttctttttcggagaaaagttaaggaatcgggcgggttttgtatgtatatataacagtcaagttgggcatgcaatttgnanggatngttncatnagtgtagnntgcattaatacaattgaattatattggcgaatatnynknyntatgatactacaagcatacatgtgaaccaacgggcagaaatacgattgtggagtcaaagcttgttactagtttgcgacgcaactaagcaagcaagcggcggcggctggattggattggattagataatttctccaactcagcgtcacaaaagtacagcacattataccagctatagcagtatgcaagttaaacatgcaattgcaagcaggttaattcgatcatatatatggtcgtccatgatagtataacgtacggtgagtccaatctggccaatcaatcaagcagctgctggctagctagcttgcactgaccggccatctctcaagcgttgacttgattaattgcttctatgtttggcacccaattaattattttttctaataagtttgaattatctgcgcagatgccatgatgcatacacacacaactggcgcaaattataagatactcccaccattttatattataagctgtttgactttttcttaattaagcttctttatgtttgattaaatttataagaaaaaatactaatattttcaatataaaacaaatatattatcgaaatatatttaatatcaaatttaatgaaattatttaatttggtattgcagatgttgctattttttataaatttaatcaaacctaaagaattttaagtaagaaaaaactgaaacgatttataatatgaaaatgatgagtaactttatgagctacagagagagaaacgacagacataactaacaatatcatcaatattaagaagatgatgagatggcgcgtacgtattatatcaagtggagtagctcaaagaatctataaaaggcgcagcccgtcgtcgagccctctcatccctcttctttgtctgatcgatcgattgcttctccctcctctcgctactagactagagagtaggtagagctagctttctagctcgtggatcgttaagtttgtagtcctgcccgggcgccggcggtgaggtcgc

SEQ ID NO: 650 - DNA, 2199 bp, Oryza sativa
  misc_feature (55)..(55): m = adenine or cytosine
  misc_feature (56)..(56): n = any nucleotide
  misc_feature (60)..(60): r = adenine or guanine
  misc_feature (61)..(61): n = any nucleotide
  misc_feature (62)..(62): s = guanine or cytosine
  misc_feature (63)..(64): n = any nucleotide
  misc_feature (70)..(70): n = any nucleotide
  misc_feature (105)..(105): n = any nucleotide
  misc_feature (107)..(107): n = any nucleotide
  misc_feature (127)..(127): n = any nucleotide
  misc_feature (134)..(134): n = any nucleotide
  misc_feature (142)..(142): n = any nucleotide
  misc_feature (144)..(144): n = any nucleotide
  misc_feature (260)..(298): n = any nucleotide
  misc_feature (1192)..(1192): y = cytosine or thymine
  misc_feature (1193)..(1193): n = any nucleotide
  misc_feature (2119)..(2119): n = any nucleotide
cgccgccagcgctcgacctcctcgacacgctgctcgccatcaagccgtccgaccmnggcrnsnngccacngccgccgtagccctcgacagcgacgtaagcatgcnanccttttcccccccccccctnctcctcncctccacncncgcatggatctctgacatgtcgtgtcctctgctcctgcttagtacttcaggacaaagccgcctcccgccacctcccgctgccccttcctcttccgcccacaaccgctggagacgtnnnnnnnnnnnnnnnnnnnnnnnnnnnnnnnnnnnnnnnccgccgcgcaccgctgactctcgatcgtgtccggagagaggagagagagatgaagagaggggaaatggggagagaggaggaagaagaagaggggtgagaatgacatgtggggaccacatgggtcccaccattttttattaatttgtgtgaaactgacatgtgggtctcacggggtttattatttttccagatcgagttgccacgtaagcgccacgccattgccacgtcggataaagactgagtcaaattagccacgtaagcgccacgtcagcaaaaaccgccctcaaaacagccgagggatctaatctgcactggttttgatagttgagggatccgttatatctggttttccggttgaaggacgaaaattagattcgttaacaagttaagggacctcagatgaacttatttcatgaaaaaacgattttgctatatctcacatgaaaaaaagaaaaagggagaagaaaattaacacatgaaaaaaagaaaaggagagggagaagaaaattaactttagagtgcagttgtggatcgttctgatctcgatccactgctctgcatcaatgcatcatatttcagatcacttcaggttatagctatatctcttctgaagctgaagccctgcgaaataggcctttaaacgctttaaggttactggatgatcatatcggcgtaagaccggtttaaacatggtttcgctttgtgaatccaatgtgagtcacgacgtgacacatggcacgtccttggagctttagacatatcgaatctgagcactggagtggccgagtgggtgagcggccaaatccgttttagacagatcgcactgacacgatgttgatcattgatactaataccattttatcaagcagtagtgttgaaaaaaaaacttatgtyntcttcaactgtgagatttcatcccgtttcaagatgaacaagccatgcatgtgagatgtgaacagaaggcagaagacagtggaaagacaggacaaataagtgaagagggatcaaatcaatgggcctgacggtttctgaaagttgacatggaaatcgccggtgatcaccggtttatacgttatttaaatctgcgatttccactttcgtttgctttcggggttccaatttgagtcacgcacatattcttcatcgtgctttggatctcagcaccgtagtaacttttggacaaattgcattcgccgacactaataacatgttctttttatgctgctttacatatactgcttatccacacccaatcccatgttcatatattatgagatggagggagtaaactttgttaacagcaacattttttatattaaagcatcaactaattaaagcacaagatacgcatgttatctcaataaatcttccagtgcatgtataaagaagatgtcgccgctaacttagataatttttgtgacttttatcctggccggcataattaattcttccggaaattaaaagctagtttttccatattcatcagtacagacaagacagcatagtaagcgaagcatacctgacgtgttagctcattgtaactcgatctggaacactcgatgctagatacagacagacactcctcgtgatgaacgttagcatttagcaacatacggtgataaagcagctggggatcgatccatccatccatcgtctttacacgtacttaccttgctaaccgcactgtcgactcttgcatgtttgcatgtaatccaaatggaccccacgtggaacatgctcacagtgctttgcagctgctttccaaaatgctttctttcacttcttccattcctctgtccacaaaaaaagtagtgtgttctngagcctatataagagagggtcacacgctccagtcgactcaccatcgatccatctgacggttagttccaagggaaagaaga

SEQ ID NO: 651 - DNA, 2199 bp, Oryza sativa
  misc_feature (243)..(257): n = any nucleotide
  misc_feature (346)..(346): n = any nucleotide
  misc_feature (382)..(383): n = any nucleotide
  misc_feature (387)..(388): n = any nucleotide
  misc_feature (390)..(391): n = any nucleotide
  misc_feature (393)..(394): n = any nucleotide
  misc_feature (401)..(401): m = adenine or cytosine
  misc_feature (406)..(406): n = any nucleotide
  misc_feature (423)..(423): n = any nucleotide
  misc_feature (425)..(425): n = any nucleotide
  misc_feature (471)..(471): n = any nucleotide
  misc_feature (487)..(487): n = any nucleotide
  misc_feature (499)..(619): n = any nucleotide
  misc_feature (896)..(896): n = any nucleotide
  misc_feature (898)..(898): n = any nucleotide
  misc_feature (1484)..(1484): m = adenine or cytosine
  misc_feature (1487)..(1487): n = any nucleotide
  misc_feature (1489)..(1489): n = any nucleotide
  misc_feature (1634)..(1634): n = any nucleotide
  misc_feature (1638)..(1638): s = guanine or cytosine
  misc_feature (1640)..(1640): y = cytosine or thymine
  misc_feature (1643)..(1643): n = any nucleotide
  misc_feature (1645)..(1645): n = any nucleotide
  misc_feature (1685)..(1685): n = any nucleotide
  misc_feature (1852)..(1883): n = any nucleotide
  misc_feature (1885)..(1885): w = adenine or thymine
  misc_feature (1890)..(1890): n = any nucleotide
  misc_feature (1895)..(1895): n = any nucleotide
  misc_feature (1904)..(1905): n = any nucleotide
  misc_feature (1912)..(1913): n = any nucleotide
  misc_feature (1923)..(1923): n = any nucleotide
  misc_feature (1925)..(1925): n = any nucleotide
  misc_feature (1997)..(1997): k = guanine or thymine
  misc_feature (1999)..(1999): n = any nucleotide
  misc_feature (2002)..(2002): n = any nucleotide
  misc_feature (2004)..(2004): n = any nucleotide
  misc_feature (2017)..(2017): n = any nucleotide
  misc_feature (2020)..(2020): n = any nucleotide
  misc_feature (2027)..(2027): n = any nucleotide
  misc_feature (2073)..(2073): n = any nucleotide
  misc_feature (2100)..(2100): k = guanine or thymine
  misc_feature (2101)..(2101): n = any nucleotide
  misc_feature (2108)..(2108): n = any nucleotide
  misc_feature (2192)..(2192): k = guanine or thymine
  misc_feature (2193)..(2193): n = any nucleotide
ctagaaagttctacattgtgaaacggaggaagtagacaagtttaacctcgccaaggtcctgatgatgtctgtgaagcctgttttagcagttttaaccttgcaagacaacgaactcttttcctgctggaaagtcgaagcaacgtaatttggtactactaccatcaagaatctctgccagatagccatcatacatgcacgaaagcgctgtcagattgtcaaagtaattccctcgagaataaaaannnnnnnnnnnnnnngccgagtgcctcccattgttctagataccaagacccgactttccaacggggaaacaaaaaattatgctgcttttcctcctccttgcgtnccagctatcaccgttgaactgatacattgtcatgcnnacanngnncnncaaaacmaaaancagaaaaaaaaagaaananggaagaaaaaaaaagagtatatggccggtggttgttggcagattangtattgttgctgtganttttaatgctannnnnnnnnnnnnnnnnnnnnnnnnnnnnnnnnnnnnnnnnnnnnnnnnnnnnnnnnnnnnnnnnnnnnnnnnnnnnnnnnnnnnnnnnnnnnnnnnnnnnnnnnnnnnnnnnnnnnnnnnagctgcgcaaggggcgctacgagcccagcgagaagcgcctcgacgtcctctccaccggcagatacctcctcaacctctacctcgacggcctcctcgacaagtcctgatctgattagattatgcatctaatctactactactccagtatttacatgagcataccagtacaattaattaaacatcgatcaacttcttttttttgtcatgagagatgtgtatatatgtatctgtaagtaagcactggcactgtaatcgccaacacctgtgtgatggaccnangatggcgtgctctggatggattcagaggcggagcaacagaaagagactaaattagtttgttcactgctctgctgttctgcaacgaggagtgaatcgatcgatcgattgcacgcatggtgccagagttgtgacgatgttaatggcacgcgtgcttcgcctcattcatatccctgtacttccgatgacacgtcgacgctcttgtgtgttgtgttgatcatgacgaggtaggtaaggtagctagctatagcttgccaagccgtatgggtcgagataaacacttaacaaagcgtgaaggattagtatcttactaataggcaaccttaagcagattccatgtgaatgactgatcagccagcacagtagttagcatatgacaagtgacaacatgcaagactgtgagatttatgaccagtgaaacctggggcggttttgctcacggacaaaatcagcagaaagcggctttgcccaccaacggacggcccggatgcgtccgtcgcggtgacggacgcctttacgctacgtgcgccccatctgggaggggtgccacgtgggccgaacacgacgacgtggccgcgtcagccccctmacncncgtccatccccgttgctctctccacctggattacgtgaaccgcgtccatacgccgccccacctcgcgcgggccgtccgttccacgcgcccatccactcaccggtccatgcacccggtctactcaaaaccaactccccgaccgacncccsgytcncnacacggcaccgacgtaccaccactgacaggtgggcccgcnagggacaagaggtgtctctaatcccgcgagtatttaagtgcgcgtagcgatctctcagttcacacagtgctactgcttgatgagaaataagaaaatagagaaaaaaaatgggtggaaaagattagcttaatacagcgcggtaaaagtaattagaggcagatagtaannnnnnnnnnnnnnnnnnnnnnnnnnnnnnnngwtaaantaaanactctcccnnctcgtcnncgctcgggtncnccgttgcgttggcccccctttctcttggccttgcccccgcgcggccgcaccgctcgcctgagatccgcgttkgngcncnccgtttcggcctncgntttccanaggtgtgttcgtttgctcatcccgtccgattcgtcatcgtatgctncgtttttggttttgctaatttttttgknttttgtntttgtggctgtggtgatctgattgattgagggtgtgggcgtgcgtggtggtgttgcagggcgggcggaggagaccgcataggtknggggga

SEQ ID NO: 652 - DNA, 2199 bp, Oryza sativa
  misc_feature (500)..(500): n = any nucleotide
  misc_feature (788)..(788): n = any nucleotide
  misc_feature (1872)..(1872): n = any nucleotide
  misc_feature (1906)..(1906): n = any nucleotide
  misc_feature (1937)..(1937): n = any nucleotide
tccaggaacatgcttatttcgcagatcagaaacatcaacctaggtacccacttctcttcttcaatcaaacttctcttcttgaatcaaactactccggcatgagtaattagcagcacgcaccggcatgagtgtcgttatatataaaaagatgagaaggggaggaggcaaatcaatgcaagcagtgattattagaaggtgaagattaaaaggcggtagtgggcagcgggcagccagctaggcgcgagcgcaacccttcgctccctgccacaccacgcaatcaggggagagggatgagcgtttcttattaggtcagttgactttgtgggctgggctgggctgggctgggccgagtatttgggagccatccaggattaaagaaccgagcaacaggaaaaaaggagcacaaaacaatctgatcggttgatgtggagcgatccaatggatgaaaatacataatgacgtggcaaactgagagagcaggaaaatagaattagtggggntgacttgtataggtatataggatttgctctaaacaagaggaacagatattcaggctacgagtaattcatgcggttatgtggaactacctcgggaaagtattctttatacggtgcaatcgcacctatgtgtatatatagttaagtatttcataaaatttgttaagacagataaagatgatataaaccactatgcaaacatgcacaacgaaatttaatttaaaggtaaagaaataaaaatagcaaattctatttgtactgtagaggtattgtgttcgcaatctgattttnttattgagttttacttctgtaattatagatctattttagctttgcatgtttgtgtatagacttgtaccattgtgatcaatgctaccatttttttccaaattgtttttatatatatttaagttgcatgcaaatgatgggtgcagttatgtcatggttatggataaggcataccctctatccttggacttacgaagtatacgtatacggtatacccaagaggttacggattacgatcgtatatgccaaggaaacgtgcgggatattaaggaaattatgtttacaggataagaaataagcagtccttttcggggaagatacagtctcatcatatcgtacggggtccaatatctccgagttctactttgaggccaaagcgatccacggtataaaagggatccctgggaggggttcagatcatcgaatctcaccaccaacacaccccaccatagtttacgaagccggatcacgtggaaccaagtcgccaggagatctcgccgagttcatcgactatgatctagtcggcatcatcaagtttgcttattcctcttgtaatctgtggttttctccatataatccaatataaactggattagggctattacctgtcaaggggcctgaaccagtataatccttatctttttgtctgcttgatggcatattacatagatcctcataccagcggaccccaataccctaattatccggtctacgggtatcgcccgtcgacaagttacacctagatgaaaagaaaatccatgtccgccacaactcgcaacatgtactccatacgtcccatattaaaagatattttaggtgaatatgacacattctattactatagacagttaaatatatgtgaacaatgttatacatgtttctttttaaatgctttgtcatgcctaataagagttcttgtattatctttacagtgttttaagcctttcaatataaaaaaaaggcctttcaacatatagatagacttttacagactttgtcaaaatttgtagtactaagatacgtcatatgcatctaagatctcttataacatggagagggagtaatttacaaggtcgctcttcagcanaaaattcatgttcagctcgcacaagcacaagcangaaagatggaattcctactgacttgtgcctnttgagtgctccatctctcaaggccattaaattgcctatgggctcaccggccaataacaaactcctactgaccagtgttatccatccaatccagtgtcccaaagcaacattcaagcccagccaggcctccaaaagttgcaagttgagcatggcaaaatccccggcaattctcgactataaatacctcagcagacacacacccagcttcatcaatccacccacctccgaagtgtatctgcagcatgcaggtaccgatcgaacac

SEQ ID NO: 653 - DNA, 2199 bp, Oryza sativa
  misc_feature (943)..(943): n = any nucleotide
ggttcatctctattttttttagcatcataagaaatcggataagattgagctcatatttcacaaatgcgaatcaattttactgtaaaatagaactcaaatgaactgagactggagagcaagatagaagtggcaacatatggaaattgaaaagtcattttggtatttatctgaaagctttattgagctttgtgaatggaccttgcgtgagctctgaaaccagcttaccaccgttagttccagctcggttttctttttttccccttaaaggtttcatgcgtatcgtgacagatgttacataatgacaaattccccagctggagcacctttatccctgctgtttgcatgaaattagcttgtcttgtagttccctccagcaaaaagaagtctgaaacaaaacaacatttcgaaaaaaaggcatccatgagttagcatttctacagttgtctatagaggggaaggctgcacgacaaagtttccaggcttggaaacaacctcttatgtaaaatttttcgtatgtatcagatgatttgtttgcgttacggcatctccacctaacatcaccttcatcatgcgcctatggtctttctcttgcctgttttatacgtaaaattggaaacgacagaaacttttgccatctttattaaaggaaggcaaatatgcaaatataggcatcaagatcacagttagtggattatcatctttgtaggttaacatgtcctaccccaggggagcttatactcaagtactccatgcattttcatgaaatgagaaaaaacgatttttaagagaaatgtactttcttgtatttatgccaaatggcaaggactgaaagggaaaaactaagaaagggaacgttacagtaaggctctgtggggactggggacttcagagaaacgtgaaccctgcttccttcctctgcatgaacataacaccagaggtttcnagcctttcacacagttgttgatggcttcacacaattcatctctacctcctgactctttataaggacccccagcatcaccacaattgcacaagtacaggcattagatccacaagaacacttgggcaggcaagcacctctttgatctttaagccgttgttatgttctatttctgagcatatggtttctagttatattctttttcttcattcgtttcatatctttgaagtgttgatgcaaatgcggtgaacaactatcaactgtgtactctccaagtgaatgcgaataatcatttcctgtgagaattgtgggctagataaacgaatgaaatgctgttttatctatgtcatgtgtggaaatttagttaattttccggtctttttatgcattgagatgggtatgctgtttttttagttgggtcccatcatcttgagaattctttcaaatttccttttctttatcctatataaaggatagagaaggcgtatgcctaggtgcaccaaccctgaaagttttattctaattgcgggaatggtttgtaatttttgcttgttcaggttctttttcgtggcctttcttttttttccccttattttgcttagtctttcacagtccaatttttgggaagtagtatatcttagtttggtcctaaggcaccatgttgtactgcaggaaaaaaaagagtaattgtattctgttttttccttgattactatatccctgttttaattaattttgtgcctttgttgtttgatgttggaacttcaatgcccataattagtcatttgacttgttttgggttttgacgctatcttgagtgccataggaaactggtagaatttagtaataattttatatagactgaatgttgagcccaccacaaatggtttccttctgtacaagtatttaataactcaagcacaggaaacatcagatctctaatctaaaggttaacaatgggctcaagcaggagcagtagttcagctctatctgtatatttagaagggctggatctacctgtccaccagcttttaattttaccctggcagctggataacttcttgtctgttaatttcatttagtgctgtgttattttcttcttgttgttcaggatggatgcttttgaatttctggaatttcgtattttgttctatctctttatgaaatgacgttatggcacactttttctgcatattcttgatgaaaataattacctagtcatttttttagttgcaggtttgtctgggactttgagtacc

SEQ ID NO: 654 - DNA, 2199 bp, Oryza sativa
  misc_feature (1068)..(1068): n = any nucleotide
  misc_feature (1210)..(1210): n = any nucleotide
  misc_feature (1364)..(1364): k = guanine or thymine
  misc_feature (1365)..(1365): n = any nucleotide
  misc_feature (1409)..(1409): m = adenine or cytosine
  misc_feature (1410)..(1410): n = any nucleotide
  misc_feature (1425)..(1425): r = adenine or guanine
  misc_feature (1426)..(1426): n = any nucleotide
  misc_feature (1457)..(1457): m = adenine or cytosine
  misc_feature (1458)..(1458): n = any nucleotide
  misc_feature (1463)..(1463): n = any nucleotide
  misc_feature (2036)..(2036): w = adenine or thymine
  misc_feature (2043)..(2043): n = any nucleotide
  misc_feature (2047)..(2047): n = any nucleotide
  misc_feature (2191)..(2193): n = any nucleotide
agacaagtttggttgctgaatacgacctttctgtatctttgtcgcggcgatcagtgatctacttttatcgtttctacagcccatcattttccatttcctgaggagagatctcaacttgataaagcagatgtcatggaatctttcatatatatcaccaaacctcaacctgggacaatatccacgttcattgcattcagtagattagatgtcgttttaccaagcatggaagaactagcttaaagtcttaggtttgtgacaagagctagcagtcacacacagatcaaatgtggttgattgatagtgagattaaaggtaattcatgaaaaagtggcatgatttcgcaacaaagccaaagctgtgttgcttttgcaatgagctcggcaacgatgccttgtgttgtgctccgtcattgtttagttgttagcgagctggtgttgtaagtttagttctctagccgcccaccgtttgaagctttcggcaaggttttgtccttgtcgagatgttgttttttctctttttcttttaatctgttggattttttacttatatttattgaaatataattggtagttctcctaatgatttagtttcaaggaaaaaattggcatgatttcatcatgctcaaatgtgggcagtaggacatatatgcatcattggaattaggtatgttctgaagacgtacaggaaggtcccataccataattctctacacaacagagaatacagcttggcaccattgatcaagtggacagacttgttcctgaaaaatggaggagaaggtggcacaagcaagtagcagacagatgatgaacagaagagtcaattggagaagagtgcttctcaatccaacctcccatgtagatccaagaaacttcctctcatccctaaatttccttcttcttctgtgctttgtgttgtgcacaagtcactgaatctctgaattttgactttctcccccacactacttcaccttttcttcaagatgtccatgtcagtgaacaaaaaccggtcaccatcttagcaattagacgaatctccatcaacctaagagacgcataagacgttttntcaagtcaattcatatctaatcctgtccactaaaggacctacttaaaatgcttagttagttggtcatggtggtccttaactaaatggcacacacgagtcaccaaactgaatgctctgcagttgccttttggtactggcaaanagcacaagaggacaagataagatatggctttttccaagtgaaaatattccagcactagcaacagaaataacaaccaaaactagctactagatcatgcttaatgtgccaacgtgctcaacatgaccatttctatggaaataataatataataaaknataagttcaaaaggctcaatgcttctctgagaaaccaacttaamnacgagtgcaaatttrnctacttacctgaaaaatgataagcaaaaatmnctganagtatctactgattaacaattcaatgtagtcctctcatgccactaatatgttcaaccaaagttaattgcttgctaatttaatcatcatgcaaaaaaggtacaattgctgtacagaatagaaagtggtaccaatatttcaatttctcaaagatattaatttattataccagtgccgcgctagttcctgtgcatgacgtttttcttcaagaatggtattttttttatcacgtctctatatccaaccggatatatacaacattttaagtcaagaatttagtccctcagataacccaatctaaaattcacttctatagagatagaaactcagaactttgggatactaggtcgctgcaaaccactagaccaaatactctttcgctcatgtgcatgacttgtttaacaaaaaaggtaaattgtttgcaagtgaacaatatgcataaacaagccaaagagtacacgccctagtaatatatttgagatcaagaaagcaaagtacatgtaaagtaattaacaagacaaaataaaaaagagaaacttcctctcaacaaaaaaaaagggaaaaaaggaaaaggwtaaactnttgngctcatctcctctcctccatataagtacgtaccatccaaagccgtgataccaaagcttttccattcctctcttcttcctccctttctcctcctcgccacctaacgtcgtcgacgctcgccggcggcaaggtgtgatctgtgacnnnatcatc

SEQ ID NO: 655 - DNA, 1356 bp, Oryza sativa
  misc_feature (1)..(14): n = any nucleotide
  misc_feature (49)..(193): n = any nucleotide
  misc_feature (262)..(262): y = cytosine or thymine
  misc_feature (266)..(266): n = any nucleotide
  misc_feature (295)..(295): m = adenine or cytosine
  misc_feature (299)..(299): n = any nucleotide
  misc_feature (461)..(461): n = any nucleotide
  misc_feature (463)..(463): n = any nucleotide
  misc_feature (466)..(466): n = any nucleotide
  misc_feature (468)..(468): n = any nucleotide
  misc_feature (962)..(962): r = adenine or guanine
  misc_feature (966)..(966): n = any nucleotide
  misc_feature (1163)..(1163): y = cytosine or thymine
  misc_feature (1165)..(1165): m = adenine or cytosine
  misc_feature (1167)..(1167): n = any nucleotide
nnnnnnnnnnnnnntaatgtcactactctagtcatgagttatagaatannnnnnnnnnnnnnnnnnnnnnnnnnnnnnnnnnnnnnnnnnnnnnnnnnnnnnnnnnnnnnnnnnnnnnnnnnnnnnnnnnnnnnnnnnnnnnnnnnnnnnnnnnnnnnnnnnnnnnnnnnnnnnnnnnnnnnnnnnnnnnnnnctaacaaagaaaacaacaatgattatcttgactgaaatgatatggattaccatgtttaaagtggatccytttnctatacaaagtattattgatatctaaacmagancatatatacttaaaaactcaaaagctaggctatccacaaatatttttatgagtagagtctatccacatatttttttcgctaaaaggaaatggaaaatgccataacagattttaagaaaactagcaataaaatgtgaatttttcccattaaatagtaaatacnanatnanttccatcgctagccaaaacgatacaataagatttgctcatttacttggaaaaaatcctctccaccaaagtgaaaggtgaataaaacctttcaagtatgtggttgtggttagcattgctaaagaaagaaacacatagtcatcaaaattgatcccccatccacataaaaagtgcacaagaaagggatgctcatgagctaaagtgaaaatacacacgagtgcgtgctttacaaagaatatgaacattgcgtgcaagaaacgttacaaatgaaatggtgagacaaaatgtgctccgtgcatacgtggtggtgactcacattcgtatgaatacggacaaacaaattcatgcttcgtgtatatatactagttgcaaacgtatcggcatgtaagtaaattaagtgtacgtgcttagcctaacttagtaagttaaccacactaaaaaaaaatgtatacgctataagcgtgcgtgacacattgctacgcacgcaaaaccaaargaanaggaaaaaaaacactactccacgtcatgtagcaaaagggcggaattctttccattatctttagaaaaggaaaatatcatgtacagtatactactagtggtgtagatacttggcgtgagcgtagcaaaaacacaaagacaacttgaccccccgtatattccaaaggcacccacctcatatccttatcctgcgcccctyamcncccaccgtcggatgcgatctggacggccacggattcccctgagccggctataaatcccacctgaggtgcagccttcttccccgtggtctctcagaggtgggttggcttctcctccccctcccggttcggttcggttcgggtccggttcgatttcgtttttttttcttcttcgtggggttggtgggaaag

SEQ ID NO: 656 - DNA, 2199 bp, Oryza sativa
  misc_feature (113)..(113): n = any nucleotide
  misc_feature (249)..(249): n = any nucleotide
  misc_feature (253)..(253): n = any nucleotide
  misc_feature (269)..(293): n = any nucleotide
  misc_feature (309)..(309): n = any nucleotide
  misc_feature (353)..(357): n = any nucleotide
  misc_feature (359)..(359): n = any nucleotide
  misc_feature (361)..(361): n = any nucleotide
  misc_feature (363)..(363): m = adenine or cytosine
  misc_feature (364)..(364): n = any nucleotide
  misc_feature (381)..(381): n = any nucleotide
  misc_feature (382)..(382): s = guanine or cytosine
  misc_feature (383)..(383): n = any nucleotide
  misc_feature (392)..(392): s = guanine or cytosine
  misc_feature (393)..(394): n = any nucleotide
  misc_feature (396)..(396): n = any nucleotide
  misc_feature (399)..(399): n = any nucleotide
  misc_feature (401)..(404): n = any nucleotide
  misc_feature (407)..(408): n = any nucleotide
  misc_feature (412)..(412): r = adenine or guanine
  misc_feature (413)..(413): n = any nucleotide
  misc_feature (415)..(415): n = any nucleotide
  misc_feature (431)..(431): s = guanine or cytosine
  misc_feature (432)..(432): n = any nucleotide
  misc_feature (436)..(436): r = adenine or guanine
  misc_feature (437)..(437): n = any nucleotide
  misc_feature (455)..(455): n = any nucleotide
  misc_feature (534)..(591): n = any nucleotide
  misc_feature (930)..(930): w = adenine or thymine
  misc_feature (1653)..(1653): n = any nucleotide
ccctttgtcgaggcgttagttggcaggcactaatagcttacagtaaagtaaagagcaacgtgccaacgtacgcacgctaacgtgagttcatgtagcgtaattcccaagttctnttttttttgtcagcacgtacaagcagccgctagcctcgccctgcatgagaagctcgcggcgcgccaccaaactggcaggcactcagctcgctgctggtcccgcacgtcgccacacgatcgacgtacgcacgcgagngagntccaccgatggtttannnnnnnnnnnnnnnnnnnnnnnnnccccggtgcccaacanaaaccacacaccacccgcacgaaaaaaaccgaaccgcacgtgcnnnnncntncmnggcaaaccccaaacagnsngcacggcgsnnanccngnnnncanncgcrncncgaggagaaaacaaasngggrnaacaagctggaaaagccnaaggggaaaagaacggagcggaggcttcacccacggccaccgcgacgcgccaccagcgtgcggtgcaatgcaacgtacnnnnnnnnnnnnnnnnnnnnnnnnnnnnnnnnnnnnnnnnnnnnnnnnnnnnnnnnnngcgagcgacgtacgcgagtgcatgcagatgcatgcgcggggctcgcgcgagaccggccgatgggttcgcttctcttctctctcccgtcccgttgcgtcgtcatagacaaaagtcggttttgcttttggttttttggctctgaggcactgacgtgcgggccagcgtacgcctgcgtgccccgcatgtcatcgtcgacaccggccggggaccgggtaaaatgtgttgcgggagggagagggggagagagagatcgcgcgggcttcacgcaacggcgctacaaatagccacccacacaaccaccccctctctcacaattccctcagttctctgtctatctcwagacacacataactgcagtctctctctctctctctctctctctctctctctctctgcttcacttctctgcttgtgttgttctgttgttcatcaggaagaacatctgcaagttatacatatatgtttataattctttgtttcccctcttattcagatcgatcacatgcatctttcattgctcgtttttccttacaagtagtctcatacatgctaatttctgtaaggtgttgggctggaaattaattaattaattaattgacttgccaagatccatatatatgtcctgatattaaatcttcgttcgttatgtttggttaggctgatcaatgttattctagagtctagagaaacacacccaggggttttccaactagctccacaagatggtgggctagctgacctagatttgaagtctcactccttataattattttatattagatcattttctaatattcgtgtctttttttattctagagtctagatcttgtgttcaactctcgttaaatcatgtctctcgccactggagaaacagatcaggagggtttattttgggtataggtcaaagctaagattgaaattcacaaatagtaaaatcagaatccaaccaattttagtagccgagttggtcaaaggaaaatgtatatagctagatttattgttttggcaaaaaaaaatctgaatatgcaaaatacttgtatatctttgtattaagaagatganaataagtagcagaaaattaaaaaatggattatatttcctgggctaaaagaattgttgatttggcacaattaaattcagtgtcaaggttttgtgcaagaattcagtgtgaaggaatagattctcttcaaaacaatttaatcattcatctgatctgctcaaagctctgtgcatctccgggtgcaacggccaggatatttattgtgcagtaaaaaaatgtcatatcccctagccacccaagaaactgctccttaagtccttataagcacatatggcattgtaatatatatgtttgagttttagcgacaatttttttaaaaacttttggtcctttttatgaacgttttaagtttcactgtctttttttttcgaattttaaatgtagcttcaaattctaatccccaatccaaattgtaataaacttcaattctcctaattaacatcttaattcatttatttgaaaaccagttcaaattcttttaggctcaccaaaccttaaacaattcaattcagtgcagagatcttccacagcaacagctagacaaccac

SEQ ID NO: 657 - DNA, 2198 bp, Oryza sativa
  misc_feature (303)..(303): r = adenine or guanine
  misc_feature (332)..(332): y = cytosine or thymine
  misc_feature (374)..(374): r = adenine or guanine
  misc_feature (422)..(422): y = cytosine or thymine
  misc_feature (630)..(630): n = any nucleotide
  misc_feature (1027)..(1027): n = any nucleotide
  misc_feature (1030)..(1030): n = any nucleotide
  misc_feature (1032)..(1033): n = any nucleotide
  misc_feature (1041)..(1042): n = any nucleotide
  misc_feature (1847)..(1847): n = any nucleotide
  misc_feature (1871)..(1871): n = any nucleotide
  misc_feature (1879)..(1879): n = any nucleotide
  misc_feature (1915)..(1915): n = any nucleotide
  misc_feature (1941)..(1941): n = any nucleotide
  misc_feature (1958)..(1958): n = any nucleotide
  misc_feature (1975)..(1976): n = any nucleotide
  misc_feature (1992)..(1992): n = any nucleotide
tccgaaaaataataaatctcatgggacccacatgtcagtttgaatgaattaaaaaatggtgggtagcattctcacacctcctctttccccatctctcccctctcctctctccagcgccacggggtcacggggaggtctggcggcggcggccgacgacgcgggggaagggcgggccgtcagtggcgggagtgttgggggactcgccgtagcccaccacgatgacgccgtggttgacgtcggcggacggcggtgcacggccctgtgtagacaccgctgccgtagagctggaacatgaagttgccrgcgtcgacggtgacggacaccggctgcgycgccacagccctcgccaggtcgggctcgctgctggtgtcacrttccggtagcccgcgatgctgaccgcgctctggttcagcttcgccgcytggcacgcgctgttcgcggcgtggtacggctagctcgcctccgtggtgactggtgaggccgtggttgccgacgatgaactcgaacagctcatgtacccgccgcaccccacggcctcgtcgtcgcagtctacgagctcctgctccgacagcgacaccagctcaccgttcttgttgatcccctctatcgccgccacggcggagaacgccnagcaagaacctgcatccacacaacacccagatttccatcgattaatctccaacatttttacaggtttgaatctttctttaccatgctattgctcacacaccacaatcttcttggtacttcacttccaccactgctcctttcttcctccaatctacgctcttcggcagaatatcatcactgctctctccaggcattgctctgaggaattgcgacatgaggtctgaaccccagcatcttggctctgaactcctcgttcgtcaggtcggcgaacgtacttcttgtcagccagcttgtagccattgcacatggagttgaacttctcaacaagctcaacgttgctcctgtacacctcgaacctcctctgcttctcgtcggcagtcgtgcagctcccggcacngcncnngcacgagnnctagctcgtcggagacgggcggcgcgccgcggccccgatctcctccacgagcccccgcgcggggtccgcgccgacgccgtgagcgaagacccagcgctcccgccgccgacgccctgcccactgcccttctcccacgtcgccggccgccgccgccggacctccccgtggccccgtggcgcctggagggaggagaggggagagatggtgagagaggaggaagaagaggaggggtgacaatgatatgtggggccatgtgggccccaccattttttaattcattcttttgttgaaactgacatgtgggtcccatgagatttattatttttcggatcgaattgccacgtaagcgctacgtcaatgctacgtcagatgaagaccgagtcaaattagccacgtaagcgccacgtcagccaaaaccaccatccaaaccgccgagggacctcatctgcactggttttgatagttgagggacccgttgtatctggtttttcgattgaaggacgaaaatcaaatttgttgacaagttaagggaccttaaatgaacttattccatttcaaaatattctgtgagccatatataccgtgggcttccaatcctcctcaaattaaagggcctttttaaaatagataattgccttctttcagtcacccataaaagtacaaaactactaccaacaagcaacatgcgcagttacacacattttctgcacatttccaccacgtcacaaagagctaagagttatccctaggacaatctcattagtgtagatacatccattaatcttttatcagaggcaaacgtaangccgctctttatgacaaaaatagntgacacanaagtgttatctgccacatacataacttcagaaattncccaacaccaagagaaaaataaaaanaaatctttttgcaagcnccaaatcttggaaaccnntttcactctttgcagnattgtactcttgctctttttccaaccgatccatgtcaccctcaagcttctacttgatctacacgaagctcaccgtgcacacaaccatggccacaaaaaccctataaaaccccatccgatcgccatcatctcatcatcagttcatcaccaacaaacaaaagaggaaaaaaaacatatacacttctagtgattgtctgattgatcatc

SEQ ID NO: 658 - DNA, 2198 bp, Oryza sativa
  misc_feature (453)..(453): n = any nucleotide
  misc_feature (490)..(490): n = any nucleotide
  misc_feature (514)..(514): n = any nucleotide
  misc_feature (516)..(516): n = any nucleotide
  misc_feature (541)..(541): n = any nucleotide
  misc_feature (543)..(543): n = any nucleotide
  misc_feature (600)..(600): n = any nucleotide
  misc_feature (606)..(606): n = any nucleotide
  misc_feature (619)..(619): n = any nucleotide
  misc_feature (1323)..(1323): n = any nucleotide
  misc_feature (1325)..(1325): n = any nucleotide
  misc_feature (1761)..(1761): n = any nucleotide
  misc_feature (1770)..(1770): n = any nucleotide
  misc_feature (1773)..(1773): n = any nucleotide
  misc_feature (1778)..(1778): n = any nucleotide
  misc_feature (1781)..(1781): n = any nucleotide
  misc_feature (1784)..(1784): n = any nucleotide
  misc_feature (1787)..(1787): n = any nucleotide
  misc_feature (1837)..(1837): n = any nucleotide
ttagagaagatctctctagttctccacacacacacgttttccaaactattaaatggtacgttttgcaaaaagtttctataggaaaatttctttataaaattatattaattcttttttttcaaatttaaataattaatactcaactaatcagtatggttcatctcgtttcacgtatcttcttaatcttctttttttctctaaacacaaacgcggccaaattactagagaaaaattacaatttgtttcattggaaaaagaaagtgtgcgacgatagaaaccagacctaaccaggcatggtacacgcatgtggcaagaatggtagtacttacttttagatcaattggtaaaataaaatatgatacccgatacttttagggtaaattggaaccatgccattataattttacaaagtttgagatatgccatcggtatctcaatgacatgtaggacccncatgagtcaatgacatgtgggtcaggatgatatatcntaaattttgcaaaattataatggnantggttctaattttcccatacttttntnatacataataactccacaatacttaataattgatactatcttcattctaattgaaanagagtntattttttttatnaggatctgaaaaaaaacttgtccatatttatatataagtgaatttttgagatggaggtatcacacccataatattcataggtactataaaatttggtaccaaaaggttcaagtatcatgatattgatctccatgacaccaagataccaagatacttgtactatgacatttggtacctaatggttcaattatcattatacctaatatcaccatgatatcttaagatatcatgatatatatttgatacatttatgatatttaggtatcatccatatctatatctatatactactcgtacctgtttaatggtaccatcatacatgataccttcatgatacccaaagaaatcatggtatttaggtatcatccgatatttttatatttattgaagttatcataatacctgaaactttcataatatctgatgatactacctctatattttaatagataacgccattaatttttaggcagacgttggacccttcatcttattcaaaaattttagggctaattggatccataccattaaaaatatgttggttttgaaatatgacactagtattcacgtatcgggaaccatgccattataattttacacgtattcaagatatgccactaccctttggatgcatttacaaaaatctggaccaaactacccttttccccttattccttctcccttcttcccctttcttcttccgncnctcctccatggcgtgacctgactggcgatggtggccaccacagtcacacctcctcctttctctagcactctttcgttcgtgtctccctccaccttagcccgccgccggcctcctcatgcgcgtcatctccctccacctcgacccgccgccggtctcctcttgtgcatcagcgcgtcctagatccagtcgcctctcctcgccgtgtgaggagctctgggcaatggcgatgaccaaagaattaaagagcggccacttctctctggcaagctcctgcacctccctccctccctccctcaccgcacccgcagcttctccggttcagcagctgcctccaccacctcgacgcccgatgcagcgaggacggccttcgtgaagagcctcggcagatggcggacctgcggtgttctgtccggcgctccgagctcccgcgacggangtcgcaggngangagangtngangangagtgaagagagagagatagaagatgaggggatttttcgtccaatacatncaaaatacgtatcttagtggcaccattgagattacgaacaagcagcagtggcattgttacaaatacacaaatagtaatggtatattttaaaaccggcaattttttagtggcacgtatctaattaacccaaatttttaatatgtgagtgtgtacgttctatgaatctgtcacaagtcatgacgccgcgagccgcgtccagctacaaaccactcaacccaaacgcatccaaaacccctcgctgagctgccatgcatgcactccccctcctcccactataaattatcaccacctcattcccgccatgtctcaccaccaccaccaccaacactgcaacacaacacaccaccatgaagacggcatc

SEQ ID NO: 659 - DNA, 2161 bp, Oryza sativa
  misc_feature (86)..(88): n = any nucleotide
  misc_feature (99)..(99): n = any nucleotide
  misc_feature (275)..(275): n = any nucleotide
  misc_feature (282)..(284): n = any nucleotide
  misc_feature (304)..(306): n = any nucleotide
  misc_feature (310)..(313): n = any nucleotide
  misc_feature (642)..(642): r = adenine or guanine
  misc_feature (645)..(645): y = cytosine or thymine
  misc_feature (677)..(677): y = cytosine or thymine
  misc_feature (679)..(679): y = cytosine or thymine
  misc_feature (685)..(685): y = cytosine or thymine
  misc_feature (693)..(693): y = cytosine or thymine
  misc_feature (722)..(722): y = cytosine or thymine
  misc_feature (767)..(767): k = guanine or thymine
  misc_feature (970)..(970): n = any nucleotide
aacttccaacttttccatcacatcaaaactttcctacatacacaaactttcaatttttctatcacatcgttccaatttcaaccaannnttcaattttgncgtaaactaaacacaccctgagatgcactttggattacactagtgcttattttcatcagtctgggcctgcagattaattggacagtcgatcaggctcatgtctacatatcatgtgtctgcattatctgtctctgttaattaaggctgatctgtttttcttttcttagctaaggttnattcccnnnatctggagtggtctccactnnngaannnnaccgtcaacaatggtttgggccccggcttgttgctttggttcacaagaccaaaaaaattaaaagagaggaaaaggcctttttttttttagtttttaccttcaacccaaaatatggttttagaatgtgttggcaaactgttttgtttgaccatcaatattgtgtagaatggagacgtaatgttgttgttgttgtattcattttcataacatgtagccactgctaaaattttaattataaaacttagctttagagttgattttgattttttttaatgtagtctatttttgaaccgtggcttttaaatctctaatagaagatatttgctctrgtycaacaaaaagtacctcgaggtagcggtaactyayggtacyaaatcctytccgatcattgaatctaacaatgcccatyctgctcagctagatccaacgatcggaaacgatttagtaccgtaakgtaccgttatctcgaggtattttttgttggaccggaataaatctcctaatagaaacatacataaaagttttattcattaactgtttttcagttgcttcgctcatttttctaaggctaatcaactatagttcaaccgatcaaagcctatagttttctagaaattggtactcagatcaaattgcctgctttatagaccttgtcantactctcaatgacttgcattttggataggaaggggtatttgtgtgaaatcaaggtgttgatttaatctatatagtgcacaaattgataaatacacacttatcactaaaatcgtaaataaatcatatgatatatgaccaatatacccttcaaggaaggaggacggctgaagcgaagaggaacgaatgagaagggcgaggaaggaaagtggatgagtatgcggatattatggtgcgtgaaattgtcaacttggtcatccatattattgtccttggacattccattttcgacgtcttctttcttttccttttctttatcaattattgactgtagaataatatccttaattttgtaactttatttgctctcgataagcttagcagccccacatgctatgaagttgaccattgaatggtctccaaattattgataagccaaacccccagagatggtcttaggaaaaccgtttctctattctataggaatctttgactacgaaactactgttcttttttcgactaattgcacatgtccaatatacctggtaatcactaaaaagaaaagaaacactactgtgactgaatcaccttatgaagtatcaaaactatttgggagcaaaatgttttgacaaattatatgctgaaaagacttgttccttctgtgaattaaggattagtttggagaaatatgattggatggatgtcgttataattctgaatagactgaaccatcgatacatagtctcttgtttgttccattcattttttttctagaatgctaagtaatttgttatatttgtgatgaccagtcagagttgagcaactcgtgctagatcatagctcaagctcaactcgaactagaaaattatgacttaatgatgcaaagataacttaattttaatccaatggcgtgttcccacgttgagttagattatgaggaggacataaacgtgtatgattagccatggtcactgattttgaaaggactgaactaatgtacttgcatgaccatattcttcagcgttgatcgagtaattaacagtcataaacagctcaggtacggttcagaactggaataaaatagtgcaacttctactgtatatatattctgccttaattatagactgcaactgcaggcaacaaaccacctgcaccatggcttgaagcaaactagcttcatccgttttccagagc

SEQ ID NO: 660 - DNA, 2199 bp, Oryza sativa
  misc_feature (823)..(824): n = any nucleotide
  misc_feature (907)..(907): n = any nucleotide
  misc_feature (950)..(950): n = any nucleotide
  misc_feature (1118)..(1118): n = any nucleotide
  misc_feature (1163)..(1163): n = any nucleotide
  misc_feature (1179)..(1179): k = guanine or thymine
  misc_feature (1335)..(1335): n = any nucleotide
  misc_feature (1820)..(1820): n = any nucleotide
aagtatatgtgatattgaaagaacgattcaattggctaattgcgctgttgtagattgtgtgcctcaattgaactggccatggcgactacaacaaaaacctcatataaagacacttttgtagaggtgttctgcaaattgcctctaagatctggtgttttgtagtgtagagacactttacacagacactttgaaaattgcgtagaaaacttttactttagagacactttagagatattttcagcacattttattaaattatatcttgtagaagtattctttcgacactttaaaatgtacctgatatgtaaatgcatttcttgagatattttaaactttgtacaaacacttactttttagaatgataatgtaaactgaagaactaaatataaataactcaaagcacaaacatacaagtaacgacataaggttgagttcgctagtgcattgaagataaaaatgatttgtccaagagatcttgagctcaaggatttgcaatagcaagggaaaaatattttactccttttttacattggtttcatagggttgtggtacaatttaataatttaatgcctctaccattttatagacattttataaaatgtctctttgcgtttcatatggttgtggtataatttaataatttaatgtctctagaaaatgcccataccattttatagatattttataaaatacctctttgtttgtacagacaattcaccgtaagtgtcactagaaaatgcctctaccatcttatagatattttataaaatacctctttgtttgtagagacaattcaccataagtgtctatagaaaacgcctcnnccaacttatagacaaatttataaaatacctcttgtctgtggtgaaaaatgcctctaccatcttatatattttataaaatgtcnctttgtttgtagagacaattcaccataagtgtctctatagaangcctctaccaacttatggacattttataaaatacctcttatttgtggtgaaaaatgcctctactatcttatagacattttgtaaaatgcctctttgtttgtaaagacaattcaccataagtgcctctggaaaatacctctaccgacttatagacattttataaaattnccattgtttgttgtgaaaaatgtctccaccatcttgtagacattntataaaatgcctcttkgtttacacagacaattcaccataagtatctctagtacatgcctctaccatcttatagacattttataaaatgtctcgttgcttgtagagacaattcactataagtgcctctaccaacttatagacattttataaaatgtcttgtttgtagacacanttcaccataaaacacttcttaggtattttattttaaaatgcctctacagtattgtaaaaacatttaaaaagtgtctccacaaagcatttttcttgtagttggctcttattttggggttggtcttgccttccataggtatctctccacgtcccactaggtgtacaaaccaaataggactaaagaaaaccttagcccaagcaagggaacttgagaaacgacaaaatcaggcacggagtcagactctgccagtctatctggccacatgccgtcagttagaccggccccacactgtctgtctgaccggctctatgacgatagtcagacttgtcgcgcgtagcaagctaggtccttttcaaatttggctatattttcctattttcgctttaggtgccaaatttagggttttatgtcacatactccatccaagataaaaaaaaatctaaatctaggacgaagggagtaggtgaatttgtcatattcgatgnagaaggaaaaaaaaaagaaaacttggaaaactgtctagagccttcgcacatagttttcgaatacgattatgctttaaaaaaacaaatgaattcacaggtaatagcagctaaacctctcaaatgtaataccagcaaaaccgtttaagaaataccagcgaatccttagaagcacctcaaataccaccatactttttatttttcgtgacgtgaaatggttacgttgttgcaaacaaagcatattattttgtctatagtatgaaaatcttgccccagcgatctctataaatactgagaacctctagaaagtactccaaactatcatcagccatcactttcccccaccttatcaatctgccctcctgaccctagaggtgaccat

SEQ ID NO: 661 - DNA, 2198 bp, Oryza sativa
  misc_feature (1117)..(1160): n = any nucleotide
  misc_feature (1412)..(1413): n = any nucleotide
  misc_feature (1418)..(1419): n = any nucleotide
  misc_feature (1429)..(1430): n = any nucleotide
  misc_feature (1437)..(1438): n = any nucleotide
ggtgtaagggaagaagaggggccaggaaggagaaccgtggggaggtgttatttcgctgagatttgctctggtccaataaaaagtacctcgaggtacctgtaccttacaataccaaataatttccgattgttgaatcgaacaatgcccatcctatccaactagatccaacgatcggaaacgatttggtaccgtgaggtaccggtacctcaaggtacattttgttggaccagagcaaatctctatttcgctagaagcttggcgagagcttctgagctctaaggccaggccaacggaaggtattgccccacaaaaaagttgatgccaagtgggatgaaaccacacttgagatattcctcacacagtgtaagtcatacatccatcttaattctgcaattcagtacagtcggtcacattttgtatttaaacccttagattatttttatttgcatataagtctaatatttgctgtatgccccctaaaaatcataaacatatataaaggcccaccccttccctcttcttccacctctctctctctctccgcttgagctccactctccctccccaatcgacgcgacgacggtggatggaggcgccggaggaggggatcgatgcagcagtaaggcgtggattgacgcgacggcggcggattgacgtggcgacggcggatggaggcgccggaggtggggatcgatgcggcggtggtggatcgatgcagtgacaacgtggatcgacgcagcgactgtggggatcaacacgacaacggcagatggagccgctgaaggtggggatcaacgtggcggcggtagggatcgatgcggcggcactcggggtggcagatcgggtcgtcggttgccggcggagcttccctggtaggcccttctctccagtccaaaccctctccatcttcttccccggcgcgggagcagcaccagcacagggcaatgactcggggtgaggcatctccctaacacagctcctcgcccgttcctcaccaaaagctgacgaaactacgggggtgcggtcctgaccgagctggcgcgaatattcctctcaggaggggtgagaccacgctctagcgtggagcggtggccatggcctaacgatcgctgcactnnnnnnnnnnnnnnnnnnnnnnnnnnnnnnnnnnnnnnnnnnnngtgaatgctctcaggcggtcattgcttttcttttctttttctgtccatataaactctacgtagcatagtcgatgctattcctcagccctgaagagaaatttttgccaaaaaccctatagagctagcataaattaaaaggcctccaacaaactcaggttgtttcaggtcatcttcccaacaccttctgttgcataaagacaatgatcactgacatcaggcaatggcagcagtatatatgccacctgacgaccnnaaagnncttgtcaccnnaacaagnncccacatgcatgtgccatatttagtcatttaattagatcttcatttccatccagcgtacttaaaagctccccaaattaactaagcgacacttgcagtaatctataacgagtaaccaaaattcgattagcactgagccaatctaggataatgcaactgaagtccttaattgtaaacaacaacctcagatgaccagtctcgagcttagctactacctgctccttcccatgttgactctgtttaattccacatcgtcttccttgatcccaccttatattaatccagagcctcgcttaaactaaatcactcttgtcacttaattaatcacaggaaccgcggctaaacacgtcgcgtggctgattaattactcccgcacatatagcctaatgatcagtaatcgctggttggattaattgttagtacacgcttgtgtggctttgacgcatgtgagccacacgtagaattcgtttgaaatcacatgtagaaattgtagaaattaaatatgacttcgagggagcgtagaactttgcagtttgcaccctctgcttgtgtgtataaataggtgcatcgcgagttcaatggccactcagatcattagcgagaaagcaagcgattagttgttttgtttcggtgactagctaattaagctcgccgctaatcacttgggattaagctacttgttcgacgctaatctccaccatttggtcttgaaaaacactaatcacttgtcttaatccctttggttagtagcgtacttgtgct

SEQ ID NO: 662 - DNA, 2199 bp, Oryza sativa
  misc_feature (934)..(934): s = guanine or cytosine
  misc_feature (935)..(935): n = any nucleotide
  misc_feature (1165)..(1165): n = any nucleotide
  misc_feature (1583)..(1583): n = any nucleotide
  misc_feature (2007)..(2007): n = any nucleotide
  misc_feature (2124)..(2124): y = cytosine or thymine
  misc_feature (2125)..(2125): n = any nucleotide
gtttggaaaagggaacttggtaagtcttacactgaggcgccgagcaacaaatcacatgtatagccggtaactaacagaacacacaaaatgatttcaagcctaaatcagctcacagtttttagagttgagtagctaaaccctgtagatatcagtcagaaagtgggattgagtatggaggagaaaaaactagtttccaatcatatactagttgagagttgggattgagtatataatagacggacaacaagcataacttaacctatcgaatgcttaacatataacccacaccaattgggagcaatggagggttaatatgatcaacagcccgttccattatgccattttgatcacttaagttcactcaggaaaaaataaaaagcacatttccaatttccaactgaatcacagtacctgtcaagacgaagacgtggtcacggccaccggagcgccgccacgctgggtgggcggtgacgcggtcgacgacctcccgctggcggcggtagtcctcgttcccctccttcctgcggaacgcgcccttggcgccccacccgagctccatctccgcggacagcgtcgcgaagaaggggacgaacaccacatccgcgtccctccagtccgcgaccaccctgacggcgggcgcggacgacgagcccggctggagggaggcgaggagccagtactcggcgctgtactgcttaatcagtgggctatccgggtacggcgagtgcgcgcgcggaggccgcggcggcgggtggtcggggtcggaggaggccgggatgcgggagtcggcggcggggagcgaccagtagaggtcgaggaggccgtggttgagcgcgcgggggagctccgcaacgtagaccctgaggaggcggcggcggtcggggccggacgccgcttgctgccgcgagaaggggagcggcggggaggcggggcsnaggaggaggaaggagagggagaggaggagcgcgacggggacggcgaggagcgcgaggcgcgccatggccgccttccagatctcgctctgcttgcttcggatgggaggaggaggaggagccgccatggccgcactgctgcttgtgcgatgcgttcgtgggcctgaaactagtatacttaactgggccgggcttttcactgtgtccgtggtccatttgccgcgaaaaaaccnaaaaaaatcctcgtcttctctctcgccggaaaccgcttaagccagcgccaccgtgtcccatgcgctgcaccggccaccgaatcaatttttgtttatctttttaaccttttttattttaaaatttatttatatataagatctaaacattttaacaacgttatttgggttagcgtggcaagacaatactactacgtcgatctggctaatagtacgtctattatcttgacattgcagcagtgagaagggcacgagagaaatagaagtcgtcatcgacgtcgcctactcccttctgctgctcccgcttctcacctccgcagccatcctcctagtcctctccatcgtgaagccgcctgtggacaagagtggctgcggcggctggtctgccactttctctaacgacgcccaccttgcattcatntccaccgccatgctccggctcaacttctttcctacctcaccccgctggtctcctccccctcctcctcgatctgccggcctgctcagacgaggagaagaggacagggtaatgacttggtcaccatgacatgcggagcctacgtgggtcctgtgctgactcagctgctttgttgaacaaaaccagggtcaatatcacctaaagaccaagaataattcggttctgtaagttgacaattttgtaattcgctgagggacctcagttgtactgtttactggaatctgaccaactggacaaacgacccattttatacttcctaggcccatatactacgtggcatggtccacgaactgatcgaatcacgaggcccacggcatgagcatttctgggctcgggatgggccctttcttcccttccaagccgtacnccccccaacacttataccatctccaatcctatacttccccatcgcatcgcatcgcacattcgcactcgtctcgtcttactcaccccgcacgtttccacttcccctcttccccaactynccaacactcctcgccgtcccaccaaaccctactaaccgccgcgcgcgagagggtcccatccccgacttcgccgc

SEQ ID NO: 663 - DNA, 2198 bp, Oryza sativa
gtgggggtgtgcggtgagcggcgtttcgcatctcaacgatgatgcctgacaaccggtgctagatagtagggtagagatttgggctgggctaaccatagtgttgtgggagagaaatgagtattgggctgggcttcacgttcgatagcaatggagcaatcgagcaatggagggttgtttgatccagatcgtatggtttaatctctgatacgaatcaaataacacaagcaagaacgaggtagattgcaacttgatttatagatgaatgattaaacacttggtgttggggttctacaaaccgaactagctgtgaaactgcatttggcagaatagtctaagcaaaatctgattctaaacgatgaaggctactgaataaatttgattagggatgtcctaaggttagccctagggcatctaccccttggtcttagcccatgacataattacaaggtccaaggccaaatcagacttggtcaggataaggtacgtggcttgttttgcatattcctaacaacttaggagatgaaagtatactccataagctttccaacgagtactcatggactgtgagagttgtagttcctcatcaacatcctaacatagtccatgggcctccgtttgaagttgatgctgtcagaaggcccgaatccgaattcaaaatgtacagaacttaatgtcttgcctcttgtggaccaaaagtgacgtggtgatgtaggagtagactaaggaatgtcacttatttgatcatccattcatcccttgcgttcggtgtctttcccgtcacccaaaaacgtaactctgcaaataagaacacacaaaactcatggtgcaataatatttgttcaaatatataacacataaatcttacatagaatacatgcacctttggttgatatatagataatgtagccatggtcatatccgaactagtgttgtcctcatcacatcacttttgaaggaacctatatgcctagaccatgatgttttacaagacatgcattttttccatgcatttacctaacctcatatctcaaagtggaattcaaccaaatgaagttaaacttgcggcaatggttaaatttcttataacttaggagaaaaatcccaccgtctaaacatgggctaaagtatggctgatgtaatttcccaacgcataaaatggttctatgagaagtgcttcttgctaaggtatatgtccctgaattcattgcagtaaaggctttgtgggatgtctcctacagccaaggctttcctcggctgtaactgtcccatttgttacgtgttttctttgctttctaaaatgaagacatgcaatctacctgaaaacaaattgttctagaagaaagataaataaccgaaactatttggagagcattcaggttacatggttagtccatggtgctagatattgctatataatactcaatgcaatgctcaatagatataagtttcaaagctgtataagaattttaggttagtgtgcaatgtaagtgtagcttcttatagcttagtgctttactatcttcacaagcacatgctatagtattgttccaagatgaaagaataattcatccttgctaccaacttgcatgatattatatttgtgaatatcctatctcttggcttataatgaaatgtgctgctgggttatacctgaccatggtatttgagagacctttgtatagctgaaaccaacgtatatgcgagcatggaacaagagaacaaaatgcaaggatttttttatactggttcatgcccctggatgggttaatatcgtgatcatcaaaaaagatatgcataaaattaaagtaataaatttgctcataagaaaccaaaaccaaaagcacatatgtcctaaacaaactgcattttgtttgtcatgtagcaatacaagagataatatatgacgtggttatgacttattcactttttgtgactccaaaatgtagtaggtctaactgattgtttaaagtgatgtgcttactgtagaagtttcatcccaaaagcaatcactaaagcaacacacaacgtatagtccaccttgcacgtaattctttgtggaagataacaagaaggctcactgaaaaataaaagcaaagaaaaggatatcaaacagaccattgtgcatcccattgatacttgtatgtctatttatctatccaccttttgtgtaccttacttctatctagtgagtcacttca

SEQ ID NO: 664 - DNA, 2199 bp, Oryza sativa
  misc_feature (2178)..(2178): n = any nucleotide
cgagagagagagagtagggacatgagttatatattggtgaaacaaaaaatcaattgttgaaacattgagttatatatagtgaaaaaaaatcagttgttgaaatatttaaattttttttatgaaacataacaaaaacacacgttgaaacatattgctaccgcatctgaaacattaaatttaacggattgaaacatatgtttttttttcatcggaatgtaatgatgtgataccttgttataaagatttaattataacaaatataatggtgtgatcatatcgtagattggataagtagttcatgagaaaaattattttgaagaccattacaacatgtatgtatttgtggagtgaatagggaggtagtagtttatccgtccggtttttattggttgcgtcgaacatatgatcctaagcattttcggaggtctgagcgtcttgctgccggggtccggagctgtagtgccactcagattttctgctgatggcccgatgcgcatgcgccctagcaggctagcagccattcctgatgggccaatatcgtgccatgggccatcgggccatcatcgtgcctacgggccattcgcgtgccgtgccagcccaagtacggcctagcccatttacgggccgtgtcagaccgtgctttctagcatgtcgggccgtcgtgccttaggccggcctgataaagcacaacccaagtcccagctcccctcgcctgcacgccgccgtcgccgaggcccggagcggtggcgtcgaatgggaggagcgggtggcggcggagctcctcggcaaggaggtgtcggtggaggtagggatggcaatgggtcgggtcgggcacgggtagagcaaaaccatgcccgacctgatgcctaatattgcctgtccaaaccctacccactagagttagcgtgcaaaactccgtgcccgtacccatgcccggtgggcgcgggtatgtccggcgggtacccaatggatctcatataaataataacttaaaatatatataatttaagaaagaaaaataaaatcaataatttacgaaattattggttaccaacaataatttgaattacatcacaacttagtatcagttagcattacaaatgaaccaatagaaagggtataagaattaagaaatgagtcaaaattagctaatacatatgtatcgggtcgggcatgggttacccatgggtaaaaaatgaaacccgcctgttgcccatgacgtcttcgggtatcgggtgggcgtacccatgggtaaaaagtcacactcacacccatgcccatcgggtcgggtatctgtggatacctggacccatgggtaaaattgtcatccctaggtggaggaggcggataacctctttgaatttgctcgatgcgggatgcggcgaggcccaagaagagcgtagcggaggagaagtcgaagggggagaggaccgggtaagaggcgaaggtgttgagtagggaggagggatcgagggcagagaggaggtggtcggggatggcaacgataggtcagggacgacggagtggaggaggaggtgttggcgatgaggtccatggaggtcggcgagaggagtagcccgtcgttggcacggccatggcccgcgcagtggttggcacatgtcatgtggacctacatggcggtggatcccacaattttttttgtgtgaatgacaaataggacccatatatttttttaattctaatgctacataagtgacacgtcaacaccacgttgtataaagaccagttcaacaccgtcacgtaggcgccacatcagcgaaatcgctctgcaaaaccgtcaagagagctaaattgcaccggttttaatagttagagggttatgatatccggtgttgtagttcagggatatgaattagactcatccactagttaagggagtcaaattggacttaatccaaaagagaacggcccatgaaacaccaaacggaaacagcacgctcggatctctttcccttcccttcccccgccacgcggccacgccaacccaaccaataagctgtctcccgtggcacatctccccaatcgcatcacgccacgtcacccctctgacgcgcgcgaccccttctccttctccccagttgcgcccccgcttctataacacgcgcctccgccttcctccccgcggcaccgatctccctcccccctcgccggcggcgnaccgaccgaaccgaaccgcgc

SEQ ID NO: 665 - DNA, 2199 bp, Oryza sativa
ctttgttcaaagttcaaaactgaaagttgtctgctgtgtgcaggctgaagagggcaaatccaaagtgcagggtgagatatctgcctcatccccggcctgtggacaactgcttggcgacgatcaccaaagtttccgatgaacactaaaagttcagggattctttagctggaaccgaaaacagccaggctaggctacttgttcctctgggacaagtaaataaacatgattataaagtatatcacgtactctggaagaaaaaaaagagagagaagtgatgtgtattcgtcttgatatgctcgctttggtttcgcattgttcttgtttgtcctagcttaggacaaagattaaagtaaagcagttcgagttatactaacaagcttcctgaatatgggaaacacgcaagcattccccttcttttctatctatccacctcactgaatttggattgttctttatcagttaataaagatggcacgaaaagttgcagtttaagctggtttttgtcttctttttattcttttttcaaaaatattgcttctttttctgtgagggcaatttagtccccaagctacatacctatctgcagaagtttagtcatatttttttttatcccgaataatttcaaccacagctatttattgttcaaccctactaataatacttgccccaaatgatccggcaatgcagctggatgaacacaagcgtcgatgataaatatggttcatatggatttagccgtccttcagttaaacctgatgttgagggttttaaagaagccactgagcaacttgcaacagagaagatttttcgaggttctgatcgagggcagaattggtggactgcatttttcaagattgaatcaacgatacataataaatctttgtatgtctctcataaaattgaccaaagatagttttgctacaaatataaaactaatgtatttaaggttctcaatatcttttttatacaaatacttaaattaggttgttgagtcaaaaggaaaaaaaagtctaatataaggttgttgctatgaaggtttacttgaaatatttgttctaaatcattcaacgtataataacattttgggtgccgagaggggggtgggaagtgaccgcaataacaaatatagtgcttacccaaggtttagcccctcacaaaaagtgaaagttttgttttttcgaaacatacatagaggcacaagtaaccgataattaatgagttcacgtgcatcaacaatgctctacgcaaacatgtgttaagacttaacaggtggaagtaaccgacaataatgaattcaacatgtctcgacagtgcgttacgcggaacgtgtgttaagggtgtgtgtagtatatgcacgtgatgtacgtacgtcttctacatgatcgcaacaaaaaaaagaaggaaaaatagattctcctattccttctatacaaggaaatactttaggaaagcccccattttccgacaaacggttatgatgggtcaaactcagccttatcatatagcaaatttctcacaaaaaaaattgtacattcaataccctactactatttatctgctgttctagacacaaaacaaaagcttatttcaaatggcacaaatcaatatatttttttgttcaagatcacagcctaccagtaggtaaattcagtttcacaagaaaagggtaagagaaattggagaatgaccaaaatacccccttcccctccatctatttctgtgtttgtgctcctctactgtctccatctcccttctcttctgcttccgatctgcagcgccttccgcctcgccggcgagcaagccggcgccgtcgacggcctcctctccctcccggacccgccctctgccctcctcccctgcgcgacctcctcgctcgctcgcccgcccgcccgacctccgtctccggttcgcgtccaattttgaggtatccactcaattcttctccccttggattgagcccgcgtggcatggattggggatccattccggactagggtttggtttctttgcctagagctgacccatccagcgtcttcctgatctctttcgggcgtcgtgctgtgcttgtagcagttcatagcagctttgttaggtctgcccccttaccgtaggcgctttaggtactagtttatcgatgaaattgggttgataacagtgatgatgcaatcctgctgttgttgttgatgagagcaggagtga

SEQ ID NO: 666 - DNA, 2199 bp, Oryza sativa
  misc_feature (1554)..(1554): r = adenine or guanine
  misc_feature (1557)..(1557): n = any nucleotide
  misc_feature (1573)..(1573): n = any nucleotide
  misc_feature (1576)..(1576): w = adenine or thymine
  misc_feature (1579)..(1579): n = any nucleotide
  misc_feature (1612)..(1612): n = any nucleotide
agacatcacatagaagatcaacacaaagcaacagagcagtgttgctttcagagatagatagctccagataattaactcggtcatcaagtctcaagggcctagttacagagttatccgatcatgacgacagacatggccccagctcgagcgttcgtgttggtgctgctcgcagtcgccagtgcatcgacggccgcggccaacacagcgacgacgacgcccacaaacccggtggctgcgccgacccagtggcagaaggcgcacgcgacgttctacggcggcgcggacgcgtcgggcaccatgggcggggcgtgcggatacggcaacctgtactcgcaggggtacggcacgcggaacgcggcgctgagcacggcgctgttcaacgacggcgcgtcgtgcgggcagtgctacaagatcgcctgcgaccgcaagagggcgccgcagtggtgcaagcccggcgtcaccgttaccatcaccgccaccaatttctgcccgcccaactggaaccttcccagtgataatggtggctggtgcaacccaccacggccgcactttgacatggcacagccggcctgggagaagatcggcgtctacagcgcaggcatcataccggtcatctatcaaaggtaccaatacaaatactccaattattttggacattatggagagaacagtgcatatcctgaccgctgcttccatatgaaaatatcctactcttgcgatgatttctacagggttccttgcgtgaagaagggtggcctgcggttcaccattaacggtcacgactacttccagctagtactggtgaccaacgtcgcggcggcagggtcaatcaagtccatggaggttatgggttccaacacagcggattggatgccgatggcacgtaactggggcgcccaatggcactcactggcctacctcaccggtcaaggtctatcctttagggtcaccaacacagatgaccaaacgctcgtcttcaccaacgtcgtgccaccaggatggaagtttggccagacatttgcaagcaagctgcagttcaagtgagaggagaagcctgaattgataccggagcgtttcttttgggagtaacatctctggttgcctagcaaacatatgattgtatataagtttcgttgtgcgtttattctttcggtgtgtaaaataacatacatgctttcctgatattttcttgtatatatgtacacacacacgacaaatccttccatttctattattattgaacaatttaattgcgagggcgagtacttgtctgtttaccttttttttttcagatggcattttatagtttaacctttcatggaccggcagtagttctaaccatgaatgaaaagaaatcatagtccacaccacgcagggacattgtggtcattttagacaagacgatttgattaatgtcttgtatgatatggtcgacagtgaggactaacaaacatatggcatattttattaccggcgagttaaataaatttatgtcacagtaataaactgcctaataaatgcacgccagaaaatataatgataaaaaaaggaaarganacataagtccattgcntcwacntttttaaaaattaaatccaacattttctatttnttggtataaacttggaagtactagttggatatgcaaaatcatctaacctccatatatttcatcaatttgtttactttacatatgggagaggatagtatgtcaaagaaaatgacaacaagcttacaagtttcttattttaaaagttccgctaacttatcaagcatagtgtgccacgcaaaactgacaacaaaccaacaaatttaaggagcgcctaacttatcatctatgacataccgcacaaaatgataacatactagagaaactttattgcacaaaaggaaatttatccataaggcaaaggaacatcttaaggctttggatatacatttaccaacaagcattgtttgtattacccctaaagcgcaagacatgtcatccatgagtcatagtgtgtatatctcaacattgcaaagctaccttttttctattatacttttcgcattataggctagatattatctatacatgtcaacaaactctatccctacgtcatatctgaagattcttttcttcactatataagttggcttccctgtcattgaactcacatcaaccagcccaagtttccaataacatcctcaaatagc

SEQ ID NO: 667 - DNA, 2198 bp, Oryza sativa
  misc_feature (1094)..(1094): n = any nucleotide
  misc_feature (1100)..(1101): n = any nucleotide
  misc_feature (1205)..(1205): n = any nucleotide
  misc_feature (1222)..(1222): n = any nucleotide
  misc_feature (1224)..(1224): n = any nucleotide
  misc_feature (1229)..(1229): n = any nucleotide
  misc_feature (2109)..(2109): n = any nucleotide
  misc_feature (2111)..(2111): n = any nucleotide
  misc_feature (2113)..(2113): n = any nucleotide
  misc_feature (2119)..(2119): n = any nucleotide
  misc_feature (2123)..(2123): n = any nucleotide
  misc_feature (2131)..(2131): n = any nucleotide
  misc_feature (2133)..(2133): n = any nucleotide
  misc_feature (2168)..(2168): n = any nucleotide
aatctattgaagaaagaggtgcaaaacttctgttttttcagccctcggatgtgcatggtccgtgctagtgattgagagaaaaaaaattacgcgcaaatatgatttgagacgagggagtgaaagtagaattattctagggcctaggtaaacatatattgatttttgtgtatataatttaattatatttaattttcaaattaaaaacggatttattataagatttcataatcaataaaaatatattaaaaaagaatcaataaaaatctgttgaaaaaagaggagaaaaaatttgaaggcaaatatgatttgacacgaaggaggcaaagtagacttattttaagagagacccatagacacagtaaaagtaataaatggtgttaaatggagaggaaagtgggaatcaaaccctggtggccgaaatgaaaacttagatagattgctacacgtgagaggtaattacatggaagatacatataccatatcaaacgtggttttggggtagataaaaaaaaaccccggtccgactgttaaccggattaaatccggattttagcgacgcgtgtggtatgacggacaaaaaaacatccagaaatcaaacgtattttttaattattaggtatatagactagaaaaaatgtccgtgcgttgcaacgggtaaagtctattttaatcttaatattgttatatggtttagttaatatgaaattcactgtgggagttcgcttggatatatatattttttgaaaatcatgagctgcagttaggagtccgatcgtctcaagttagcatgagagtttttttaaaacaaatttcttatatgattccttttgtattactaaaagtgaacgattttaaaaaccgactcaaatacgaatatgtatttccgaaaccaaacgaacctaaaaactgactcatacacggataacgtaccgacataaacatcttcaatttttataatagcagagatatagatttcttacacattagtcatcagtctactattgaataatcagataaatcaagtattttaagtaggaacaaaaatttttatgaaaattcgtgtataagtagtaccattttgaccgtttccgatnttagcnngtaaataaaattcgattttctttctattcctttagcacataatacaacctacagtaaatagttaaattggtaaatatataaaaaaatccattttaactcacttnaactattttgataaagngnttaancccctaaataatttttcatcctgttttatacccccacccccgaactattgaaagtggttccgcttattttctaacagcatttcttttttttatctctctcgtataagttatatacgtttgttcgactaccaatcttcgttgttaactttctcaatattcgtgccgtgtattattacgccaataccgtaaactagcgactatggtttgtgtgtgttgtatcattacctaattagagctagctctgccaccactgccattctacctgtattttaaacctgcatccgcaactggcacgccatcgcctgacggctggactggagtcgtgaagcgaaccggatttgttctcacgtggatatggtgcagcgctgcacaccgcgaagcttccactggcaggtggtccccggctgtcagccagttctacggccgtcgaagaaacgttccgaggtttgtttagcacgccggtttccgttcgtgcgtggggacgtgggggttttgccccactttccaaaaccacctattcctccgcgcgtgcaccccgagccgttaacgtcaccgacacgcgggccccgcgaaacgggtgaccccgcatggcagacaaagtaactcgcttctggagaggtggggccctcggtcgaggttcccgtagcggacgacggggaggggaagagaagagaagaaacggctactcctccccgcgcgccgcgcgcggctgcgttggttttggggttttggagcgttgcggattgccacggcgcacgccaccggtggcgcacgctttacaggtggctcccccgccgtctcccccgcgtgccctcctcgccgtcgtcgctcgctgcccatttcatcccccgcacggcacgcgcgggacgaaagcaaagcncncncacacnctcnaacccgcncntcctccgctctcgtccgtcgcttcggttcggttcnggctcgatcggggaggttcctcggggcgac

SEQ ID NO: 668 - DNA, 2198 bp, Oryza sativa
  misc_feature (557)..(557): n = any nucleotide
  misc_feature (559)..(559): n = any nucleotide
  misc_feature (565)..(565): n = any nucleotide
  misc_feature (571)..(571): n = any nucleotide
  misc_feature (577)..(577): r = adenine or guanine
  misc_feature (611)..(611): n = any nucleotide
  misc_feature (617)..(617): s = guanine or cytosine
  misc_feature (717)..(717): n = any nucleotide
tcgactgatttttaatttttcgtgtgtacttttcaaactgatttttaattttccgtgtgtacgcttttcaaaccgctaaaacggtacatatcttgtaaaaagtttatataggaaagttgctttaaaaatcatattgatctattttacattttttttatagttaacacttaattaatcgtgtattaatctatcgctccgtttttcatgcgaagaggagggttacaaccctccaaaagaacaccgtctaaatattacaatggagaggagagttccaaccctctaaaagaacaccgtctaaatattgacggttgagtaacaagcgaaacattaaattatatactgtaattaaaaaaaaacatgtaccccggcatttgcagagcaattaggcactgatggggtcagtattggcgctcgtctaggtgtcggtgtgctctcgttcttcgtcgtcgtcgtccttctcctcccttcagtctttcacccttctcatgcatctcgcgctgcccttcgccaaggtggcgctcaccttccaccacgccgtccgcaactaagactccggnangcaccncgggangagaargcgacgagatcgacgtcgactccgtcgagccgcncctggscgccgccgcggcgtacaggggcgaggcctggttccatgtcaacttcctgggccgccgcgccggttcttcgatcgccgagctgcgctaccactacctcggngaccacgcccttcgtcgagagctgcaccgcgctcgcggacggcgacggcggcggcggcggcgggtactgcgcgttgtgcagcgagaggtgcggtggtgagatgctgcacccgggtgatggttcgttgattcgttcgcgtgggcgggaaaacggggaggaggagctgtccaaatatagcaagtgattaaaaaaattcagttatcttctgtgattgtgatctgatcaccaattgtaaatcctcccgttataaacatttgacgacccagttgaatttcaattgtgatcaccaatcttactcaaagcaacaaaaaaaaattaatgtaaatatgcaagtaacaatcaagagtaccagagccagtaacgcatagcgtcaaatatacagccgccacatcttccaagcctgtaccttctcgcagcaagtttgggtgcaggttcaggctcgtttgagcctctcctgctcgccgccgtcctcggactttgccagttggtggctcgctacccggcaaactgttgcgaagatcgatcgcaagacgttcgacgccggggtcatcctcattatatggttgatttggaaagagcgcaacgcacgggttttcgagggaacggcctcatcggtcatgcagctgtgtgcgaccatgtgtgatgaatgggttacttggaaatcagcagggctagttacctcgttgaatgttgctgcagtgccagctttagagagattacagactttgtaatttgctttttgttgtaaaggcggtgctctaacgcactgcatttgtacaattttccccttttccttaatatacatcggtcagcattcttcgccatcccggcgaaagaaaaaaaatatacaaccgccacttcaagaggatattcagtgtcaaacatacaggacaattctactcaacaagatgtactcccaccctccctatatatttgtcgttgacttttttaaacatgtttaatcgtttgtcttatttaaaaaacttttatgaaatatgtaaaactatatgtatacgtaaaagtatatttaacaatgaatcaaatgataggaaaataattaataattacttaatttttttaaataagacgaacggttaaacatgtttaaaaaaatcaacggcgctaaatatttagggacggagggaatacgaaattaagcaaatttcttaaaaacaaagttgcagaataattttaagtttctaactgtttcctctgcacgaaagagaaccagctaaccaccgacaaccacaagctgcaacaaaatttctgtagtatccactgtgctgatctggtccggcccactgacccggcccataccagcccagcccacgttttgctcacgcaaggtagtacggcccaataaggcccatttaaagagggaggaaagccaaatcagatagctcgcctcgtctcggtcgtctctctctctctttcctctcgtctttctcggcggcggcggaggcggaggcggcggcggcgga

SEQ ID NO: 669 - DNA, 2199 bp, Oryza sativa
  misc_feature (61)..(61): n = any nucleotide
  misc_feature (66)..(66): n = any nucleotide
  misc_feature (77)..(77): n = any nucleotide
  misc_feature (83)..(83): n = any nucleotide
  misc_feature (97)..(97): s = guanine or cytosine
  misc_feature (1139)..(1139): n = any nucleotide
  misc_feature (1141)..(1141): n = any nucleotide
  misc_feature (1143)..(1143): n = any nucleotide
  misc_feature (1146)..(1146): n = any nucleotide
cgagtgcactctcaccgccgtggtttgggcaaagcacaagctgtgggaggtcggatgcggnagagnataggctaggnctggangcaaggcgccgggscgagggagacaccgggcgcgtggaggttcggcttctctcggcgccggaggaatcggtacgaggcatcggcgcgggagcgatgtgcgccaggggcagcgacgccggagacgcgagaggcatcggcgcgggagcgatgtgcaccaggggcagcgacgccggagacgcgagatgtgacgagaagaaacagatgacgacatccccaggaaaaactaacgaaggaaaattaatccggctgaaattaattctctaatttaaatgaccaaaaagcccttttcagactcttacctaataccaaaattacccttgtatatactgctagtatatactagcagtagaatgtaccgtaaaagtcctcttgatcctgaggcttttatattggcatgactaggtgctgatttttgcgaatacatataagattggtatcaggaataactgagtaatctggtttatatacaactattgatttgtcaggttataaccttttgtctgaactgttgtatcagatatatatccagaataaggtaggtcctttgtctttataaaaaacctggataaattagctagctgaaagcaagattgatcgtgcatgcaagttaagagggaacatgcggagtcagtctagtaatgctatggcatgatgagcacaatcagtgaacccatcagcttgttaatatccatccatgggttggattttggatggagttgacctctggaaggtcgtctgaagaaagtcgaaaaccaataacaccaccactgaagtagtaatcaagttgacagggtcgagcggctggatttactgtttgttttggactaactaaacttatttatagcagcgaagaaggataagaaatttatttggaaatggtttgaaagagtagagagagggagacacatgtcatgcctgacctcgaactttcacaaaaaagtcatctcccgcccccttgaagggacactagtttattgattgattggtcagaagataatttggcatcaaatgcttgtatgcatgtatctgcgcatgttgtcatacaaatacagtagntntncantgggaggttggattgcgtcgcgtggcattattttggtttttgacagacagacatttcaagaccgaccgggagggaggtagtcgcgagcacgacgatcttgatttggattccttgtgttgttgtgtgtgagtatgaagtctgactgaccacgaatccattcacgatggggggaaaacagcagcaatttccaagaaatctgcatggctttgcttgcagtggcaatcgacacgagcgagaccgataatcccatcgtgcgcgccaccaactaaactcaaccgatgatggaacaactaagaagaattaaggaagcaaacgatcgagcaggagggaggccatgaagggagcaccaacacacgcttgctgcctttggaccttcaaataacactacgccctctgatttctttcgacatctctcctcttctcttgcactgcggcttccactgaattctttctttcttggacctatctgctgtttctctctctcagactacccaaattaaactcgtccacctgcaatgcattgccccacctgaagaggaccaacaggtatcgattgattcttcttcttcttcacctgatttgttcatgttttggtcgatcaattgccactacaaattaaactagcttgatactgtatgtaatgttagtaatcctcgatcgattctcagggggctattataatgttgcatgcaaaataggaatgtaccaattcggccagtaaattactgcaagttttcaacccgcctgcatctaatttgtttccatttccatttaagaagcagagtcacatttttcctattattaggactgatgattttggatcgccattactggggtcgggtcaaagccacccaaaatatgcttgatgcctgaattgctgatgcttgattcaattcattcctattcatattttctagctagctagctgcatcacgttgatcggcggcgagacaagctagctagctatactctcttcttgttgttgttaccaataccataccaacacaagagaagagagaaacatagcagagcaggggagctaggtgttcgatc

SEQ ID NO: 670 - DNA, 2199 bp, Oryza sativa
  misc_feature (47)..(48): n = any nucleotide
ttggaattaatgaaaaccccaatttggcgagtcaaatacgcattacnngcttatcaaaagttccaagttgcgtacaatcatagactaagatatcgtaagtacgtgcttaattattccaggattttttttcttcttccgcattctcccctaactaacctagaaacttcgatttcctactactgctggtaagcagtgcagcatccacacatcacaaaaaccacaataataaaaaaaacgatttgaattctcattctaccaccaatccggtggttaataattctggtgtgattgcgaaccgaacgaatcgaacgggaggccacggtggcgtttgtggatagacacgagggaaaaagattccgaccccattgtttatcctactataggacagaggcggaactagggtattgagcgggtgaaacctggtcaagaaaatattatagctataacttattttttaaaattacacagtacaacatatacattcacaacacacgcgcactcatctctataaacgcacgcaggcaaacccatctattttcaccatgtatgcatcactcttaatataaatttagacactcgtatcatcttaaacttgatataaagtagagtaaattaaacaagtggcacctcactttatttcgttctagctccgctagagaaaaaggcaaaacggtatatttacaaatgaaaaataaacacttgtggatataacttttacatacgtgttctcaatgatctaatagtggagactaaaaaataaactatgatgaaaaatttctaaaatcaactttaaaattaaagttaaaaacttaaattttaactgataagtataagtataaatgaaaagatgatgcggttcagtttcatggggacgataccgacgtcacgatgaattggattcttggagctaagagaaaaatgaaaatgatatggccggatcgaagcttaggtttggtgaattgctgacgggtcacgcgccgtccctgccacacgaaatctgtggccgtgcttaattaaatcgggacaaaaaaaatagtactaacaaattaagtggctggtaatgtcccccttgatcgatccctttctgtcaccattggccgcacccgtccaaaacgccggaaaatgacacggaattgaaatgacaggattcgaatccagctcgatcaattcgttttcagaaactctcagaagcaactgattcgtaatatcattcattcattcccttgtgcatttgcattcagttcgtaggaattgagtaatgctttgtgtgtgcgtttgtgattgcgtcggtcggtttcagttcaggtgcccttcgttgaaggtagctcgagtttttttcgtagaagtggccgagggaaatggtcgaggagttgtgcaattagcacgtaatcctcgtacacacggcgtgtgtttaattaggcgtgtggataattagcggtagcttttgtccattcatgtcttggaatagacagcaagagctatgaaatgcacacgtgaagcatacgaagagttagttcgtcccgcatggaccagatggtgtatttatgtacactgcgtgctacgagccaatgacgtgtagcctaggaagtatatgtttcacgcgtacgatctcatcatgccccatctgcaataagtcaattccgtgcttaatcaagcgctactttgttgacaataattgttgacattgtcgatgagacgagagatcacttgatatgcatttccctgcaagttaagtaatgcaaagaaaatgctgacgtcgtcaactctgtttcaagtctcacgttttctttagaaatgcacaaatttaacgagattttgagtttcaacagtggttcacttcagtctcggtgtgaatcaagaacaagaaaatcgggtgaactgagctactattttttttcctcagttttgattcctcatttggaggagcaattttgcaccggctttggaagttacggtcgagggatgcaattcgatcgagggtaagacatagggagaaaatatagacttgctacttcctcgttgcatccgtggcatttgggctaggcccagggaagtagacgggccaggctaggttgggcctggctgcttcggcggcgcatcaaactcgccgctcaccagcatcgcgtcggtggcacgtggcggtcgcagtcgcagtcgcagtggggatcagcggcgccgccgtgcgaagaagccggcgga

SEQ ID NO: 671 - DNA, 2198 bp, Oryza sativa
gaaaggtcataatgtgaataaaatatatatcttcatttttttacgagaatatatattcatttcgaaggatgatttagaacaattaattgttccttatcagaatatttgaaattttatactatatagattgactagctctttattaattatggccagctccatcgatcacacaccccttcagctaaccgatctatgcttactattcttccacccaaatctaatcttaatgtagctataggccatagcttgaccaatctatatgcatgcatgtgttgcggccctcacgcattagtagccaaaattgtaatgataatatggaatcttgtactctctgtctgttctaaaatatactctctccacgccgaaatataagaatctagaattggagagaacatattctaatactgtaaatttagactagacagacttcttagcaagattcgtaatatacttgtatatacgtgtcccatctgatatatatattttaggatggaggtagtagtaaattttaatctttgacaccaatagtaagaagagtagtaaaacaaattggttgccttgttgggatgagtgaggtatagatccagattaattagggctataatataaccatgcggtagtgtgggtagtttaatagtacaagttttttaataatggaatttattttgatctttgctttaccttttgcaagtattaactaaggtgttattttagaacaaattttgaattttaaattgttgttatatttttagggcagatgaattatatatctttagagaaaaagaggaaaatatgtactacctccgtcctaaaatataagtattagagttagacacggttactaagaaagtatgtaaaaagaaattgtggaagattatcattggttgagaagtggagattggtgaggaaattgaatggtggagggttgtgattggttgagaatagaatgttggtggagaaattgttatattttgaaacaaattctaaaggctaaagttgttatattttaggacggagggagtactatatcatagtcattaatgattaggacatattattaagagagaatccactcagtgccattgagttttcactacttctacaatataccactgactttgtcaagttgaataatatgccatcgtgttttcccgaacgtctactgcgtgccatcacagtccagaagctgttagttgggcatctgttagagctgtaaaaagacctatttgcccctaactcattgtacatgtttttttttttgccgagggacatatgtattatatgaatacatatagagaaactgattgaatcatataacagcctatgattgctagcttcacgcgttggtagagacgtagtgaactagtgatctgttgactttgaaatgggacatatcggaaaaaaataaatgtacataatgaaaaaaaaaatcaaccccatacagttagatataaaacaagtttgaacatggtgcatggcactgagctcatatagatatagaaatgaataccaaaatattttactaaaacaggtgctagggtttattagtcatgggcattttagtcattaagaaaaaattcaatacaccaaacggatgcaccctaacggcttgtggacggcgatggcacgcagtagacgtttgggaaaactcgatggcatattattcaatttgacaaagtcagtggtatattgtagaagtggtagaaactcagtggcactgagtggattctctctattattaattaccatcatgtaaaatataaaaatggattgtgacatacgcacattccattctgacctgactgagctatagctactaattaacagctccagctcatgcaatgcaatgcaatgcaaccctgaaacaacaagcaatatatattgaaaaccatttagaccggtttatatattcagcaacagaatcgtactagtagcatataattagctcacatccaaatccttaatccgtaagcacactcccaaattaaacccggcaagttgcatattatccatgaaaaacccatcagttgctattgctatatactagcctctagctctagttgaccggcgagagtagtattaataccgctaccacgcgtagccgccgagctcgccattagcttgctattctctcttcttcttcttcttcttcttcttcttcttcttcttcttcttggtgtgattgaggtggaggagga

SEQ ID NO: 672 - DNA, 2198 bp, Oryza sativa
  misc_feature (153)..(153): n = any nucleotide
  misc_feature (172)..(172): n = any nucleotide
  misc_feature (180)..(180): n = any nucleotide
  misc_feature (198)..(198): n = any nucleotide
  misc_feature (199)..(199): k = guanine or thymine
  misc_feature (203)..(203): n = any nucleotide
  misc_feature (208)..(208): n = any nucleotide
  misc_feature (215)..(301): n = any nucleotide
  misc_feature (303)..(304): n = any nucleotide
  misc_feature (311)..(311): n = any nucleotide
  misc_feature (326)..(326): n = any nucleotide
  misc_feature (331)..(332): n = any nucleotide
  misc_feature (336)..(336): n = any nucleotide
  misc_feature (341)..(341): n = any nucleotide
  misc_feature (343)..(343): n = any nucleotide
  misc_feature (355)..(356): n = any nucleotide
  misc_feature (358)..(360): n = any nucleotide
  misc_feature (366)..(368): n = any nucleotide
  misc_feature (370)..(370): n = any nucleotide
  misc_feature (400)..(401): n = any nucleotide
  misc_feature (409)..(409): n = any nucleotide
  misc_feature (411)..(411): n = any nucleotide
  misc_feature (413)..(480): n = any nucleotide
  misc_feature (485)..(485): n = any nucleotide
  misc_feature (1188)..(1188): n = any nucleotide
  misc_feature (1240)..(1240): n = any nucleotide
  misc_feature (1250)..(1250): n = any nucleotide
  misc_feature (1259)..(1259): n = any nucleotide
  misc_feature (1416)..(1416): n = any nucleotide
  misc_feature (1417)..(1417): m = adenine or cytosine
  misc_feature (1993)..(1993): n = any nucleotide
  misc_feature (1994)..(1994): s = guanine or cytosine
agaaggattagttggtctaataaaaggtttagttttatggggatcttagaaaggctttaacttttggacgtgttttagttaatcatgagcttgattgggtgccggctgctggatgcatgggcacgttaagtacgaacacgcggcatgatggangcgttgtcttagctttcgngacgtccnggccggaaatgcctcttnkgatnattanagaattnnnnnnnnnnnnnnnnnnnnnnnnnnnnnnnnnnnnnnnnnnnnnnnnnnnnnnnnnnnnnnnnnnnnnnnnnnnnnnnnnnnnnnncnngtgcaanggcttcatgggctanaaagnnagancatcnanaaaatttgtggnntnnnagatannnangggcccattatttgcaacatactccctccnntcccaatntntnnnnnnnnnnnnnnnnnnnnnnnnnnnnnnnnnnnnnnnnnnnnnnnnnnnnnnnnnnnnnnnnnnnnattcncactctatataacttttcacttcaacagatcatccatattacatcctaaatataccaacatcctatattttattaatatttttcaactaccacacatttttactcatatccctctcacctttcaccacttaaaaaaaatctcgggaagtgggtagttgaggatggagtgaggagagagaacctccatatttagcataggaagggctaggtttggagaatctccaaaaatggagtatgtgatggtgactttgctggagcactatttttctcctccatactccaaatatcggatggatgactagataaaggagctgctggggatgctctaagaacctagaaccggataaaacattttatagtactatgaatctggacatcataggctacctgtccagattcgtagtactaggaaatatcccatccgattttaggttcttatatattgggacggaggaagtactcatcagcttccatgtttaatttccacgataatttttttcactaaaaaccaaactttcttcattcattcacgggagaatgtggactggactgtcagtaccgcgcgcacacaatcaacatgaccaaaaagcatcagatgccgctagggatggcaatcgggtgcgacgggtacgggtagtgcctatccatacccgtgcccatgagattatttttttccgtgggtatatctattactacatgacgngtaagaatggttgcccatgcccatcgcccacgggcgccttgtgcccgcaggngtgcccgttnacccgccantacaaaagtagtggaataaaaagtctacaagcttctaagttcgatatcgaatttaaaacatcaaatattctctgtctcggtgtggtgtctctcctctgacggcgatagagtaagagggagagataataagggaaataaaaggaaaaccgtagaaaanmaagaacgtggcttatgtattctagtggattttgcttctagcctacatgtaagttagatttcgtgggtaaacgggcaaagcgggcatgggtagtgattacccatacccatgcccatttacccatcaggcatagcttttaacccaataaaatatctatgggtataaaatggagaacaaatttaatcctaatagggtttttaaccacgggtaaatagaaaaacgggcacaattgccatccctagatgccgccatggactgtctccatccaaacctacgtgtatcttcaggatgagacacgccgacgcgtcatgccgcctcaaaggccgcggaaacccaaccgcccgtccgccagcccagccgctgtgacgtgctcactgtttcggcggacggacgcatatgtgtccgtttcgcaataaacacacgggagcaatcgcatcacgccgacccaaaaaaaaccgtcccgtccgctccgcggcgcttgacaacgcgtggtgcacccaatagctctagcgtgacaagactcctacgccgtcacgcacccacgcacgcacgcacgcacgcatatatgtgcagtgtnscgtgatgtaccacttctaccaactggtggtagtagcattgcctactttcacatacgcgcggcgccgctggtgctggctggctggcgcgcgcaccggcgggcggagagcgaggtttttcgccggtgttttggttggcctccgccgttccgcgcggtggtggtggtggtggttgctgtggtagcgagggtacgctttggagacgga

SEQ ID NO: 673 - DNA, 2199 bp, Oryza sativa
  misc_feature (963)..(963): n = any nucleotide
  misc_feature (971)..(971): k = guanine or thymine
  misc_feature (972)..(972): y = cytosine or thymine
  misc_feature (974)..(974): s = guanine or cytosine
  misc_feature (975)..(977): n = any nucleotide
  misc_feature (979)..(982): n = any nucleotide
  misc_feature (983)..(983): k = guanine or thymine
  misc_feature (984)..(985): n = any nucleotide
  misc_feature (988)..(989): n = any nucleotide
  misc_feature (990)..(990): w = adenine or thymine
  misc_feature (992)..(992): w = adenine or thymine
  misc_feature (995)..(995): n = any nucleotide
  misc_feature (996)..(996): r = adenine or guanine
  misc_feature (997)..(997): n = any nucleotide
  misc_feature (1001)..(1001): n = any nucleotide
  misc_feature (1035)..(1035): m = adenine or cytosine
  misc_feature (1036)..(1036): w = adenine or thymine
  misc_feature (1037)..(1037): k = guanine or thymine
  misc_feature (1040)..(1043): n = any nucleotide
  misc_feature (1091)..(1091): n = any nucleotide
  misc_feature (1150)..(1150): n = any nucleotide
  misc_feature (1156)..(1157): n = any nucleotide
  misc_feature (1179)..(1179): n = any nucleotide
  misc_feature (1201)..(1201): n = any nucleotide
  misc_feature (1203)..(1203): n = any nucleotide
  misc_feature (1238)..(1239): n = any nucleotide
  misc_feature (1245)..(1245): n = any nucleotide
  misc_feature (1257)..(1257): n = any nucleotide
  misc_feature (1381)..(1381): n = any nucleotide
acgttcgatttgataaggtaaaaatttttagggtaggatttaaacaggaccgtaagctaatattgatgggaaccaaccaccgatgtaactgcttagacccagtttagttctccaaaaacttttcgcaaaaacatcacatcgaatctttcacacatgtatggagcattaaatatagataaaaagataaactaattgcacagtttgcatgtaaatcgcgagacaaatcttttgagcctaattagttcatgattagccataagtgctacagtaacctacatgtgttaatgacggcttaattaggctcaaaagattcgtctcgcggtttccaggcgagttatgaaattagttttttcattcgtgtccgaaaaccccttccgacatctggtcaaacgtccgatgtgacacccaaaaattttcatttcaccaactaacatgcccttattaactcttatacgcctcaacctcagggatcggagatacaagagtctgacggctcatcaatcatgctcatcgtcttggttccacatagatacaatagttacctaaaaatatatactgcattattgatacttggttccacatatcatacgcacattgtatcttgtagttcgtgctagctgcagctgactataaatctgtagcccactgttcatatatctagtcttttatcttctcgatatatgtttacagctgttttatattctgctattttacatgcttgcaatatgcgaatagccaaatacaatgtggacgatctgttgcagcatatgtatgcatctctgttcatctactactatatttaatatttattgttgtttgctgttgtaggcaactttggagacatgattaattctctgactcatatatagacatgtacgtatgacacagttagtacagccactgttactaaacaatactccctccgtcccaaaaaaaggacaaacggtttccgtaccccaattnttgaccgkycsnnntnnnnknnaannwtwagnrnaaanaaaaagacaagttcacgcaacaaagtattaatcmwkttnnnnatcatctaaccacaataaaaatacgaattataaaaaaatttccatatnagacggaccagaccaaagttggaacacgtaaattcttagggtttgcctttttttttagnaccggnnggagtactattaattatctatntctgtagtttttcttcttcttntntattcgtgtgtccaccggagtttatgtgtgccaannccaacncacacaataaanattctcaaatttaatgtggtaccaaagatgtagtagtaagatacacatcttattattgtttctaaaaatggtccgcccatgtcgatgcgcctaattaatacactatctaattttgaggttatantagaccatcttcagtcataggatccccattttaaagcctgtaaaactaagggtatctatgtttatgatcacgggtagcattgaggtgacctcttcttatgcaatgtggcgaattctaacccttgactgtggatatgcatgacacttctattttaccactacatgttagataaggggcaaaatttgctaaattaaaccacacatatgattttatatgacatgattatttatgtacggttagatgcacctttgcacatgtcatgttacatatgcacctttgtacttgctccatcttataaaaaataaatctagaataggatgtgaaacatactttaatactataaatctggataaagaatttatcgatattcgttgtagtaaaatatatcgtatctggtcttagttttgtttttttagggacggagggagtatatatcacgaattttttttagtcttttttatttttattaatagatcattcaaaaagtattttcgaaatctaaatcttttggccacgcaagaggctggcgtggccaaataacgctaccacgctaactgcgcgtggcgtgacagagttatttggccaggtttacatctgtaaatactttttagaatggtctattaataaaattaaaaataaaaagtctaaaaaataaaaaaaaatcatatatcacctgcattcgacacagttgcaacatgacctatgggaagtaaatgtgaaatcaatttaatccgacacacctacaacttgctctgagtggttagtccaagacttaaaccccatgctagctaggctccagtatgaaaccttaagcaagc

SEQ ID NO: 674 - DNA, 2199 bp, Oryza sativa
  misc_feature (1982)..(1982): w = adenine or thymine
  misc_feature (1987)..(1987): n = any nucleotide
  misc_feature (2003)..(2003): k = guanine or thymine
  misc_feature (2008)..(2008): n = any nucleotide
aaatattttattttacacaacttcgtgatggttaattaagattgtttttggtcaaccattaagctggacacactaatggttctcatggattgaaattcctgattccatttaacaggaagagtttcccaccgcattgctagctgacagcatgtgatctgccttcctcacacctaagctcccccagtctccaactcaaatgtatcattaggaatttaggatttcccctttgtttttattttcttctgtgttggctgctagccttctacggattgttgtggaatcagggagccctatagctgtgtgtctgatgtgtactctattttgtaatcttattgacttcgagtgcgggttttggaatctgtaacaggtagcttctgatgtctaaatttgcagaatctcgcaactgatttgtaataggagttaagtagagttgaaattttgatttcattcttgctcccaaaggtagaaactgtgccatggaagatgtgtacctttgagcaagtggtcctttctcgcctttggtgagaagtgcctaattctaactattgtacttgtacaacaatacaacatatacaattcaataaagtgtaacaataaaagatcagttgataagttatagtgagattgggggatcataggagtatggtccttcacagtttgcttagctttctgtacatcctacctgttcatttgacaagttgcgctgtcattgttatgaactggtttcaaatcagtagatatattacatattttcatcattataacttataaatcaacctggcaacattttgcagtggtcttacatgtaaatccaatgattgaaaatagtgggtccgccgtatttaacgtaaaatcaatggttagatatatattttagtattattggaaattcatctaatttatttgagcaacttatgagcgtcatttggtgatttagaagcgtttgtagaaatcatacgtggtggtttgagagtgtttgtagaaagtttaatggactttactatacaatagatagatgatcatgtcaattaattactaatattgaccaacttaccagccaaattttcaccctattaattgtccggagtattagatgataaataattgaaaattgagttatatttgctacttcatatttactctctgattccattgcaaattatcaccatatcctttttgtcaatcatcatgtcctcccgttgatccttagatttctctcttgcaactacttcgtcagttcgtctcagttattgaatgatgtgctggaaatgagatacgacagttatagcttgatttggtcaaatatgagcaaagcttgctaaatcatgtttccgttaggactgtagttggattacggattcatcatggtcacgctaaacaatcacttatttcatccgttttatattgtagtaagtttttttattttttttaagtcaaacttcttaaaaatttgattaaatttatagaatagcaacatttatagcattattttagtcttattaaatctaatattaaatatattttaatagtttctttgtttatgttgaaaatattgttatatttttctataaacttaactaaagttaaagttgtttgacttttaaaaaatcaaagcgacctataaatctttgattttatatgtactagaaaaatgaccgtgccctgtaacaggcgaatgctattttaatcttattattgtcatatggtttagctagaatgaaatttactgtgttaaattcgcttagatgtatatctgttagaaaatcgtaagctgcaattaggaattcgatcgtcccaagttagaatgcgagtttttttaatgagatttcttatacgattctccttttgtatttaaaaaagtgaacgaacttaaaaactgactcaaatacagaattgtgtttctaaaagtgaacgaatttaaaaaccaacttatacacggataacgtaccaaaataccagtaaaaatatcttcaacctttacwaatantagagatataccttckgcatnatatcataatgtgattcatatctctgccttccagtctacggcagtaaaagtgaatggaaattactttccaataatcggaggttgcccaccatgatgatgtaggtcactgttgtcagtatgtcgccctgcttttaatcccattcgcttcacaccacacacacagcttagctctcgcccaaaccaaacctcgc

SEQ ID NO: 675 - DNA, 2199 bp, Oryza sativa
  misc_feature (1709)..(1710): n = any nucleotide
  misc_feature (1713)..(1716): n = any nucleotide
  misc_feature (1735)..(1735): n = any nucleotide
gttttttaggtaggaccatcggtacgatcctaataagtactatgaaatttgtaagattcaaattatataagaaaattttcatatatgaccatttggaacaaaggattaattgtggcttttggagggggagagagagagtgtgtgagtgagaaaggttagtgagacatgtaaaaaaaaatgaatctattgaatctgacagtggctaactagaggatggcttatgggatgccattatatagggattcaaagtttagattttggttgaaattgaagatgatgtgagtgaaaagttgtatgtatatgataggttgatgtgatggaaaaggactgaagtttggatccaaattttggatctaaacacatccattgttggtctttaaaaaaccaggacttgtaccatccaacttctatgcttggatcgtcctacatgaacaacagatgaacatgcagcaggtagcatctttaatctgcagcactcgtgttaggtgataaccaattgtcattacacgagaaaaaaagcagaggacaaaaacaaaagctaaccactggtttagtacacatctgatgataatctcactaacaagtgatcgacaagacaaccaagtgattggccttcatggtcgtcgccttgcaaacagacatatctcacctcgacattgtccgtgtggatctgttagcatcatggaatcgatctacctgcatctctgatctgagatactttttgctcgtgtagagatcgccggttcaaacgttttcttccggtaagtttggatgggtgatttccttcaactttacataaaacatgagaattttggaataatttttttttggttgagtggaagataagaattatagatagtattgatgtacatgtggcctcagaaaataaaaggttctaatgtttttttttagaccttgaaaactgcttgggctttgcctatgtaatgaaataataccctctttagccaaaagaacaagttgttttatatcccaaaaaacaagttgttttaaattatgtgcaattacacgagttaactttgagcataaataggattttggtatatgaaaatggcaaaaagaaaaatcgccaacacgcaaaagtcttaggggaaggtgagagatatgacacgcaagaacttgctaaaccaggtgtgactcctaaggggaagatgagagatgtgaaactaagccaagctatgtgcctaataacaacccgataggattggccatggtctcaacccattgccttccttcttgcccaattcactccaccatactgttggcacctatgatagaacattgtcgaagacgcgggtgttcctttattttcataagtgctaggcaacatgagtgcaagggagtcgaaacctcttcctgtcttgcttgtgcaggcgacatcgcgaggtttgccaccaatcttggagcatcaataaacatagtttccatagcattacacttttgtaactattattgttttgaaaaaattataccaaagaactatatgcagccaaaactgtataatctgactttgaaaaatccaaaaacggttttactttttaccgaaggaagcatatacaattgaaatactttccttagaaacatatacttgagtaacctccattttaaataatcaataggtgatatttatattcaacatacctccaataattttaaccaccataaaacacctcaaaacaaactggttgttnnccnnnnggaaatttttagatttttntaaatatttgtgaatttggtaataatttattcaaattcaatataaatgtgttaaattttcaaaaaaaatcgttcgatatttcggtgccaccgaaattttcctgcttaccgaaatggaaaacactggttgtcccagcaatggaagcctttaaaagccagcaatttacactatagggctgtgtttgcatccccatgttccccaacactttctccctcgttttccgtgtgcacgtttttcaaactactaaacgatgcgtttttttgtaaaaagtttatatacgaaagttgctttaaaaaatcaaattaatccattttttgaaaaaaaaattagctaatacttaattaatcacgcgctaatagaccgctccgtttccgtgcgggagggattagttcccatcgctggaatccgaacacagcccaagtcacaactcgaccgtgttcgccgagaaaccaagccacggtcac

SEQ ID NO: 676 - DNA, 2198 bp, Oryza sativa
  misc_feature (411)..(412): n = any nucleotide
  misc_feature (423)..(427): n = any nucleotide
  misc_feature (474)..(481): n = any nucleotide
  misc_feature (485)..(485): n = any nucleotide
  misc_feature (654)..(654): n = any nucleotide
  misc_feature (666)..(670): n = any nucleotide
  misc_feature (1418)..(1418): n = any nucleotide
  misc_feature (1738)..(1738): n = any nucleotide
  misc_feature (1835)..(1837): n = any nucleotide
  misc_feature (2054)..(2054): s = guanine or cytosine
cacgctaaaaaagatggataccaacaacacatctctagctagtacaaggagatttaaaccgttatgcatctacgtacaactccattacatcgcaggtgcttcgatacaaacttaaaatacacactgtgttgatcagtcttaagcatcacataggagtactacaacattaattagtcacatacgcacaaacagtgacagacaatgccaaattgaattgggtctcctgtacatgttagagcaggagaataagtaatagagttgtcgcactctgacaacgtgaaatctcctacaacaaaaatgtagcaaacaataactttaataaaaaatgaatatttgatcatatgccacttctttagtactgcgacaactttataatatgccactcatgtatcttacgacaaaacgattgcnnatctctacaannnnntacagtaattactggttttgtccaatttataaaaagggaattttaannnnnnnnaaantttcggtgtgctcttgttgcaccggagacaactgtgcccaagcttttcggtttcgacgtgtctttttttcgcgaacacgcaaaaagattgctcatcaatatattaaaagaaaagagttatagttacacaccgtaatcagccagaccggtttatactaggggaagaaagnaaaagcaaaatnnnnngctgaagcttagaaaactacgacagcttaaaaacaaactccaagcagtgggaaggggccgagccacgctaccctcccaacaagtccccaaaaacagcaacgctagctaaagaccacagatggccctcagagtggatgaaatctaaaaccactgagactgatatatgtatacttttatgaaagtatttttcaagacaaatctattcatataacttttacaatttcaaacttaacagcatgagagttattcatgatttatattctcaaggtttgacttaaacattgtcctaaacgactttctttacgagtacggagggagtatattggagaaccacgtggatacatggtcattgttgccttgttagagagcaatcaaagctctgcagtgcatatatatatgggtgctactgaacatgaaaagctgcatgagtacgtggcacggctgctaaaatgatagctgaagaccatgaacagagtatcctagctatctcggtatgacctctgcatgtggtgcactggtgctatgcttttgcaagacgaaaaagaaaatgtaattaaattgcgcctaaacttgataaggactgtcaatttatcaaatatcaacaatagcaaaacaaatataattcttgtttagaaatctagctccacgtaaatttttacatgtatgcatgaaaatcaatcaggtatgcggagtatgtcttaacacatagaattagcgtctaacatttcaagcgttagacaatgcgaantaatgttgccgagactagctgtgtctgaaagtaaaaaaggaaaatgtctcaagcacagtattccgttcggacggaatgatacctataagatatggcatgatgcctaatagttattggttaatattccgttcggacgggatgatactttttaggtattacctaatatctagtggtatcagctgattcctaggtatcagataggacttctgaggtattatccccgttcgaacggagtactgtcacgtagcattaaaaatacgatgtttcaattaaaaaccaaaaaataaaaaggaaaaggaaagatgtttgaaaactcaaanttgccactgttttactttttttttttttaacctttcgtaacctgcactgaggaccctcttcgtctctcctcccggcgtcccggaaaaggaaggctannnggcggcgagccgcggtaaaagtaaaacggtgaaagtgaaatcgacctctcgcaatcggcaacccacccacccaatccaccaccgcttttcacctccctgctctccgctctcgctctcgctctccaccccctattaaattaacccttcgtctccccccgcttcgagctcgaaccccaccaccaccaccacctccccgaccgccaccgccaccacgtgsggcgatcgccgccgcgcgccgcgacactccccccgatcgagctagtgtgcttatccgccgccggcggcgcggcttctagccgcgcgcggggatggggagggggatagggtcgaagcggagggtggaggacgacgacggggagaa

SEQ ID NO: 677 - DNA, 2200 bp, Oryza sativa
  misc_feature (28)..(28): n = any nucleotide
  misc_feature (30)..(30): n = any nucleotide
  misc_feature (34)..(35): n = any nucleotide
  misc_feature (38)..(39): n = any nucleotide
  misc_feature (42)..(42): n = any nucleotide
  misc_feature (44)..(45): n = any nucleotide
  misc_feature (47)..(48): n = any nucleotide
  misc_feature (50)..(51): n = any nucleotide
  misc_feature (54)..(55): n = any nucleotide
  misc_feature (57)..(59): n = any nucleotide
  misc_feature (376)..(376): n = any nucleotide
  misc_feature (378)..(378): n = any nucleotide
  misc_feature (380)..(380): n = any nucleotide
  misc_feature (382)..(382): n = any nucleotide
  misc_feature (384)..(391): n = any nucleotide
  misc_feature (393)..(393): n = any nucleotide
  misc_feature (395)..(396): n = any nucleotide
  misc_feature (398)..(399): n = any nucleotide
  misc_feature (401)..(403): n = any nucleotide
  misc_feature (405)..(406): n = any nucleotide
  misc_feature (409)..(409): n = any nucleotide
  misc_feature (411)..(411): n = any nucleotide
  misc_feature (414)..(414): n = any nucleotide
  misc_feature (416)..(416): n = any nucleotide
  misc_feature (419)..(419): n = any nucleotide
  misc_feature (421)..(423): n = any nucleotide
  misc_feature (425)..(431): n = any nucleotide
  misc_feature (433)..(434): n = any nucleotide
  misc_feature (437)..(437): n = any nucleotide
  misc_feature (1055)..(1055): m = adenine or cytosine
  misc_feature (1056)..(1063): n = any nucleotide
  misc_feature (1065)..(1066): n = any nucleotide
  misc_feature (2034)..(2034): n = any nucleotide
cgaactaaacacaccctaaatgtaggananaacnnatnncananntnncnntanntnnnacagattacgtgtaaattacgagacgaatcttttaagcctaattgcgtcctgatttgacaatgtggtgctacagtaaacatttgctaatgatggattaattaggtttaataaatccgtctcgcagttttcaggcaaaatctggaatttgttttgttattagacaacatttaatactttaaatgtgtgtccatatatccgatgtgacatcccaaaacaaaaaaaaataacaactaaaccgggccttagccgtgcggagttaatcgagtatctctgcttagcgaaaggcactgttattttgtgattaagcttaaccctnananangnnnnnnnngnanncnnannnanntgncnatnanacncnnntnnnnnnngnntantacttgtcgatgaaactcctctatatttagactattactttgacatatgacaaggtgatgaagataaataaaatagttgagggtggtcaaaagtgccacaaaggtaaatttatctggttcaaagtgaaaacatttgttaaagtgtggtcaaaagcaaaacaatgataagaaaagatgacccaaagtgaaatttacttaaaatagaaatgtcgatttattgttttaggaaaaataatgagctacatctattcggtgatttgagaagtttagttcaggagattttaaattccaataatatatgttgccgtattcgctttgttttttattcgatgacattcgatttcgttttcatatcaggggtttccgattccgaattcgattttaaaaaaatgataacgaaaacattaaaggtggtttccattcgtttcagagctacattgatttaagctcttcgttgatttgagaagtttagtttggggtttttaaattctaatgaatatctattatcttattcgataatatttgatttcgatttggacttaaaaacgaaaatggtaaagttggtttctgtctgtttccaagccgtttgcattcgtacatatcactgcatctaggtamnnnnnnnngnnttttggggaggggggggggggggctgatgggcgaccagctgtgcaaggctgcgctcgtgcggtcattttgaccccctctactctctcctctctcctctctacacgtatatacatatactatagactacatacgtataaattttgtatacatgtatataaagtttacgcgtatattacatatacacttttgacatataaaaaatatattatacacatatgtacacacaaagtttgtagacgtatacaataaaaaaggaaaaccatgagaaaaaccgaaaaaaaacatgtatataaactttgtatagaaaaaaaccaaaaaaaccagaaaaaactggaaaaccgctgcatgcctctctccccgcgcgctcctaccatcccctctctccgcgcacgctatgtgacgactgcgacgcgcgggggatagccgcacagtagcgatttcggcagtgtgatcgcttggatgctagtttagtttttttttatgttgtcacgtcgaatgtttggacatatgcatggagtattaaatgtagaagaaaaactaattacacagtacgccaggaaattgcgagacgaaccttttaagtctaattgcactatgatttgataatgtggtgctacagtatactttgctaatgacggattaattaggcttaataaattcatctcgcagttttctggcggaatctgtaatttgttttgttattagactacgtttaatacttcaaatatatttccatatatcggtgtgacaccttgggaaaattttttttccaactaaacaagccctatgccactgaagaagaaaaaagaaaggaaaatgtctatgataataaaccttggtactcaaggcattcgaagggtccaggaaggcaacgagtctccgagtaaaaagcacgataaaaacccaagagcagacgaaccgttccgccgtgcgggccgccaacacaaggacgcgacgacaagggtgnggggataagcggagagagagagaaaaaggaaaaactgtctcgtcgtctcgaaccttctcgcctccctcaccgccctaacccttcctcttctcctccgccgccgccaccgccgctccgccccctccgtcccttcgccgctaccgatctcccccgcccgcccgcggag

SEQ ID NO: 678 - DNA, 2199 bp, Oryza sativa
  misc_feature (1226)..(1226): n = any nucleotide
  misc_feature (1475)..(1475): n = any nucleotide
agtgttgcttgtctgatgattctataattttgttttagcgcctggaccttctatatctggcactggcatgatttacgggtatggctgcataatctggagagagatttgcattataaagatgagaggaagaaatgcgtacacttgtgttacagcatggtttgtgtttttacggccagttgcattgcattgtcaaatgttagtagtagtatgatgcttttatatgtttttctttggcaatctaatttcgcctatgccttggttccgggttctgagttctgacaagtgacaattctcgaactcattaagcacaagcctatttcacccttacaacaattcggaagaatatagatgggttttaaacatttgataatatttgctccccactcagatttggttactcgaaattgtacaagacctgacattcgtcatctggacactctagtagataaacgtgctggctgatgctagataaacagatgtaaagatgaccacttcaccatcaaccgtaaaaccggacgaagatcaccaaaaattgatactttggagcaacgataggcagcttcgattcagatagcacaatacttaaaagaccacatactagcatcgaattgatacatctcccctccaaatgaggctccaaaaactatccattgtttgatacagcaagcaataggatgtgagaaactgagattggcatttgtatttcactactctcatctgatgagacatgactaggctgtaactgaagctgaatctaaagaggaagattagtgtgggattgcagacaaaactgctactacttccttcctgcactgcaagaagaagaaatctgtatccagtctgtgttgaaccccattaaagcacacacagcagcttcgattcagacagcaaaagaaacattctgatagatagcatcaaattgatactagtatttcgtttgtgtcaaaaaaactctcgatatgtcgtaatcaaagctcgaaaatcccatttgtttgatacagcagcaacagcaagaaaggaacccctactccgatccagccactgaaacagtactaatgaatccggattcgcgcattcatcctatctgatgtgatgaaaagaagctagagtataagaatctaatctgggagaaggttgaggtcagtcgtcgaaggcggatgaggggtcggcgaggtgggcgaagcgggcggcggaggcggaggagaggaggaggaacttgcggacgnaggacctgacgcagtcctcctccttcttgccgagggttcgccggtagaaggtggtgacgcagtcggagaagcaccggtgcgacacccagttgtacagccgtatcctgcgtgcacaaaaatccatccatcgctactccactctctctgcgaggaggaagggaaggaaagtaagagattaaacgtacgcgtctcgggtctggagcttgtcggcgaagggcttcaagggggccttgtctcctcttcttcccnccgccggcggccatggcggcggcggcgtccatgctcttcttcagtagcagcacaagaagaagaagaagaaggagaaggagaaggagaagcgtagcccaagccctaaggccctttagtatagttgaagtggtgagatgggccgtggtgggccttcggtaattgagcccatgggctcaaccccgaaaatgccagtgggctaggtgaggtaaaccgtgcacgtgacgctttcagtttcttttcttttctttccttattatatcatcaaaaaaagaaaagaaaaagagaaaaaaaggtatggaagatactgtatagtatacgctagcagcataagctccgtccgtataattatttcttgtacgcatatgatgtacagtatgtattttacgagctgtatactaccattgcgttggatttatgctggagctatttgcctatgtagtggagtattctagaaggatgcttgtgcgccgtccattgcctgcagaaacggacggcgcgggtgggtgggccccacagggcggtgactgacgcgtgggccaccacattgggatttggctttgctttgctttcgtgccttgtcagccgctgcccccggccccttcttctccttcttcttcttcttcttcttcttctccctcaccatcaccaacaagagagaggaggagtggattcatcgatcgagaagtcgaggtagtacatacgttggattggattggaggaggag

SEQ ID NO: 679 - DNA, 2198 bp, Oryza sativa
  misc_feature (617)..(617): n = any nucleotide
  misc_feature (727)..(772): n = any nucleotide
  misc_feature (781)..(782): n = any nucleotide
  misc_feature (784)..(785): n = any nucleotide
  misc_feature (792)..(796): n = any nucleotide
  misc_feature (799)..(799): n = any nucleotide
  misc_feature (803)..(803): n = any nucleotide
  misc_feature (805)..(806): n = any nucleotide
  misc_feature (809)..(812): n = any nucleotide
  misc_feature (816)..(816): n = any nucleotide
  misc_feature (819)..(819): n = any nucleotide
  misc_feature (824)..(826): n = any nucleotide
  misc_feature (828)..(831): n = any nucleotide
  misc_feature (833)..(834): n = any nucleotide
  misc_feature (840)..(842): n = any nucleotide
  misc_feature (847)..(847): n = any nucleotide
  misc_feature (853)..(855): n = any nucleotide
  misc_feature (857)..(857): n = any nucleotide
  misc_feature (859)..(861): n = any nucleotide
  misc_feature (865)..(865): n = any nucleotide
  misc_feature (870)..(876): n = any nucleotide
  misc_feature (879)..(969): n = any nucleotide
  misc_feature (1052)..(1053): n = any nucleotide
  misc_feature (1056)..(1058): n = any nucleotide
  misc_feature (1993)..(1993): n = any nucleotide
ggatgcaggatcagttgtgcccgccggcaagcgacggcatccagtggaaaaaaaaacaaatgctacgggtacagccgtacaaacctgcaacgtactgctccgtagcacctctttggggaaacgagctgcatttgccggcacagcaaaatcataggtatgctaatataaatcttatcaaaatttaataatggtaaaattttagtaaattaataatattgctaaaatcttaattatcaattttaacaaaaaaatagtatgttgatagtgtcatcaatctgaacatgctcatactcaaggtgggttcgtaacaagtggtgccatctaggaagtcggaaccggaaatcagcttggtgagggcagtatatgcatattgtagaagccatagctcgacggtgagagtaatagacgaagcgttaaagccatatgttaagaacgcgttgacgagaagctcgagtttgaggttatggccgtcgtcaccagatcaagcccctggttaatggagaagcgcaagagataacacataaataaatagttaaaagataaaacctagtaaaaggttttagagtggtcttattctacttctaagaactttcattggtcatgcctttatacaactngtgtctctataggttttgatgaaaagaaagatgcttctacatgctagaattatgtttcacattcactactgactactgtttactgcatatacctttagctttggttaatnnnnnnnnnnnnnnnnnnnnnnnnnnnnnnnnnnnnnnnnnnnnnnccttctcannanngtattcnnnnnagnagtntnnaannnnatgnatnttcannncnnnnannaaaacnnnggttntattgnnnanannntgtnattcnnnnnnnatnnnnnnnnnnnnnnnnnnnnnnnnnnnnnnnnnnnnnnnnnnnnnnnnnnnnnnnnnnnnnnnnnnnnnnnnnnnnnnnnnnnnnnnnnnntactatgaatccagattagaggaagtaagttcgtttcttaaaacatttttttatacttccattttcctgttccatgtactccnnggnnnatggataaaggctgtgtttatttgttttggcaaaaaaaatttgatgtatacggacacacatttgaagtattaaacgtagattaataacaaaataaattacaaattccgcctgtaaacatcgagacaaatatattaagcctaattaatccgtcattagcaaatgtttactgtagcaccacattgtcaaatcatgacgtaattaggctcaaagattcgtctcgcaatttacatgtaaactgtgcaattggtttttttcattcacatttaatgctgctatgtatgtatccaaatatttgatataacgtaaaaattgaaagtttgaaggtaattaaacacaaccaaaaattgcaaatggataaggcagttacttctagagtccttgttccagatacctgtaccttatacaagaagccacagtacgatccagcagacaaagcccccacacctgatcccatcttatctccttcctgtttaccctgcacggcacccattatccaacttaacaatgccaactgggccgtccgtccgtcccgtccctgacctgcctccccctggcctggctgcggctgcggcgcggcggattccatcaaaaccaaaccagtctccgaaacctccccaccattaacctctaaaccataaagtccccccgtctcatgtcgtctcatcactcacttataatcacccccatccacttaatcacgctctcaacgctgctgtgtcacgtcacgtcacgcgcggctcccgtaataagaccaccaacctcctcctcctccctcccacgtttggagctctcgtctcgtctcgcggcctcgagccctcgaccaaccaaccacccgcttcttctctcccgtctcccgaaacctccgagagctcagaagaaaaaagaagaaaaaaaagagaaaaaaaaactggtggaaactggaaggtttgcggcngaaacgagggggagggatggtggcgaggagggcgtaggcggggggttggggttaggcggatgatggcgtcgagggtgatggcgtcgtcgtcgccgtcgcacacggcatcggatctcgcgcggttcgcggcggggaagggttggggccggaacccggggctggggtcgatgaacgtggaggagatcctccgcggcatctacgccga

SEQ ID NO: 680 - DNA, 1889 bp, Oryza sativa
  misc_feature (6)..(6): n = any nucleotide
  misc_feature (1616)..(1616): n = any nucleotide
atgatnaagagctactccctccgtcccaaaatataagcatttttaactataaatttggacaaaagtggcggaggtaatagctaaaaaattgttatattttggacggagataatagctaactagtgcagcgcttaatatcaaaattggataaacctaattatagactctgaatatgaatagatccatcctactataatgatttggacataaaagttcatatttgttatatctagattcattgaagtaggaagggtctaatcctatcctagttaattagtttataatattttagaacagatagagtatatggtaataatgtatatgcgcacgtgcatatgagttgcatgaactccctccctttttataagacatataacgctggtgactcttgtatatatatgttttgaattatgtatcttattttaaaaactatataagtatataatatcatttttagtttgttgtgatatgtttttatattttgatacttaaaacatgattttatattgtgcacatttacactaaatttttaataatataaaagtaaaattaaatgtgtgcttgaagattaacaacgtaacaacgtagtatgtttagaaactgagggagtatatatatcgtgtaagcaagcatgcatgcaattaagctagcttattaataagtagctttaggtagctaactttgtggatctgttatgtgttcctctccgtttataggaaaagagaaaaggtgagcggcgcctaattttgccatctcccgccaaacatatcatgagactaaccccgcccaagatgcgcccaaccatgcacatatatatctattactactatccgtctcaaatatgagtaacttctacttataatttcgaatgcgtagccaaaaattatcacattttagaacaaaggaactacggacatttgcctagatgcgttcaggtttgcaactgtaagcttatagctaaaagcacgtaaagatggatgcgtatttcatataatgccttttcaggttggaaaaagcaaccatctgacatgaatttttcctgacgtgatcactaatacgtactcctaggtttatgggtggcgagagccgattatcggtcaccacgtctctctggcttcaaagcaatgagaggatctcgatccttttaggctagctacaaagcaatgagaggctgctgggccatcatactagtagtatcagatacttcctccgtcaaaaaaaagaaaaaactcaatctgagaggggtctaggacaataaatctagacaaagtatagttcagatacattatattaggaggggtcacaggttaaattttttttggatggagagagtactaatcgtattaattgatcaacaggctaggccagccaaacaaaaatatagtactaatattttgctttattatttgattgattgatcacttgttggatgggaaacatcaaacatgatgcatgtgaagcactgggagcaactagcctactcctacttgtacatacttgcttttttttttttctcttttccttctcttttcaaaggggaaccagtgtggtaacactttaattgcgcctagagaagaaacaaatgtaaataggcctgctaccagtatgggccaganataaggatgggcccaatgaataaaaatggaagcccacgtcggcgtggacagcccaagcaagaaaaggagaggagaaggcgcacgcggcccaaacacgcaaagtaaagtgcagaaagaagcagagctcgcgtgtcgtcgtgtcctctcctcgttgatcgatctcgaggagttcatcttcttcttcccccttcgcctactcgcctctcctgccgcaaattccaattccaattccaatcccgcttgggcgagcgatccaccctctgcttcggctgc

SEQ ID NO: 681 - DNA, 2199 bp, Oryza sativa
  misc_feature (334)..(334): n = any nucleotide
  misc_feature (453)..(453): n = any nucleotide
  misc_feature (894)..(894): k = guanine or thymine
  misc_feature (901)..(901): n = any nucleotide
  misc_feature (1216)..(1216): n = any nucleotide
caccatgactaggccggccaccttaggcaaagtcagcccaccaccaaatcgacacgcagatcccggatcctcgccggccaccgtccccctcactccttcaccgccgccgtccgccgccgacgccgaccaccgtgcgccgcgatcttcaccgccgcccgccgccggcttccccccaccgccttccttcctgctacttcatccccatcgcccggcgccacctccactcccgccgcatgcttcaccgccgctcgtctccccgccagcccttcacctccgccgacaccgatatgcgcttgtgtgttgatgtcgggcgccagattctgggcgttaccantgactgcggttaattttgttggctacattggtaatctattcatgacacggggaattttgttattactggatttggggctttgtggatgtggatgaacagttcagggaaaaaggaaatgncgaaaagcaaaattattttcttgctttttttgttgagtgcctgatgtagtgaattgttgatgcatgttgacacgcggcaaatggagatgactggagctcttggagttgggaggacccttcaaactggagctgcccataatggtttaccagtttggtatggtttccattgattccaataatctcattcacgtttcgttgcgttggcaagtctatgagatcgtctgaaagttgaattgattctgggtgcttcgattaatatcgcaaacaactatcgaactgtcatatgttaacgtcagagtgttgatgcatttctggtgatagccattcaggactgaaaacatgaaatttgtgaagaaactgctctaaggggtttcatcatgctactcttcaagataagctatgaaagtatttctgtactttgatgccttatttccacatttkgatgtcncattaagacacgacacgtttactaaacctacacgagaattggttctctttacacatgtctagaaatttgaagacccggataattacattcccggtctcgtacgcttacgcacgggcttgtgtgtgcacataaatggctagaacatgactccgcaacccaccaaaatggcttctagctatattttgtttgacaacttgatttctggaaaattaaacgtaacggcatctccttctgcgctggaatcaaacagccaaggctactgttggaagtcacgcaaccaattataacttgcctctcttgtcgtgtgtaaatggnactacgagcatgaccacactagagattatgtaagctaaccacgcttaggggttaaatatactttttcaaaaatagaacacaaaagaataagtaaaaatatgattttcgttgcttcacatgaaaattaagaaggtgagggcctgggcgtgcctacgaattctcaatggaaaacatttgtgaaataggagatttctagaagaactatgagatacattccaaaaaggaccacataggaaactttttatcaggtttgaatcctttatagtccctactttatttttgcattgttctaaatgaggttcaaatgacaaattgatcagaatacatgtaataaagaaaaaatcatgcaggcaaagtcaaaataaaggagagtaatgttaacgcacctggcaatgtgacaacaatctccacttacatctgattatgtatctacaaatgtgaactacctagacagaaaaataaatactcaattaggtttaactcaacattcacataagggtaaatggttttccaaaataggttcggcagttttgaaacatgtccataattttacgtataacttccgtgataagttgcttgacttgttggcatgaggcacatggaatgttccagaacagcacacaattcacaagaacactactgtccacactcatgcctctcatgagcaaccaggtggcccacggggcccacagtatgccacttacatattccttgtgtgcacacaaaaaaacaaacagcagaggaaaactaactacagggtagaagccaagacggaaaggaaggatcataattagtttaataaaaaaagataagaaaaaaacaaggttctcagtgtggtgtttgtcaggacagtgcaaaactccactaaagatgtgctcatgtgctgtacctgtgttctatatttagttcttcttgagagatagagatcaagcagaggaggcaccgctaggtggtgtgttcagcgggctttaggaggttttggc

SEQ ID NO: 682 - DNA, 2198 bp, Oryza sativa
  misc_feature (117)..(117): n = any nucleotide
  misc_feature (121)..(122): n = any nucleotide
tgactaggatgccacatcagcgtagccagatatccatactgctataggacccaaattgcatggttttgtatagtttagggggtgaagatttctagtattggggattagggatgtcangcgnncttgatgtaaagttgagggacggctggtgaacttattccaaagaaggcctaggagggagggaagagaagaggacttcgatggcgggccaaaagtgaaagagagagctttgggcaggattcgccccaaaaagatggagatgattaattttagttttatcattttaattaaccctgaaattggttgttgttgatttaaaattataggttgctctgaaaatttcagtaaaaattgagggaccaatttagagcatggagaatttaagaaaaatacaccaagccactttgaatttttggatgtattttagtatttgaaatttatttgagacttttattaatttctattattccttttagaaagtgacttttaatttgggatggatctatcaggtgtgacataacgataagagagctccaaattaatttcaagacccaaattaatctcgcgttagatgttttctttcaccttcgagtagacaaagagctctctctgtgtgttccatcttcctttggttttggttctccctgagcagacttgtgtccgttcttctgtttttgcgctgattcagttgttcctcgatcctgaatacttgcacgcatgagtatttgggataagcatgcctccggaacgccatccaccaccagagtacctgcactggtagacatgcggttaagtttgtatcatttgtttcaacatataataagtaaagctaaacatatgtacttctagcttgttgatgtgtaacataagcatggttatatacaagctagtgatgttctcatcagtttggatatttataaaaaacagcaataatgcacacgctcacatatacacatacacttacgtaataatataaatacacacacatacactcattaatacgaatgcacatgcgtatatactctaacccatacggtccaatatatgccttattacacatcactctctagtctctacttgcatggaagcacgctttatctaccaaccagcttgttcagtatgccaccatatatagattatggcacacatatcctccataaatcatcattttagtatatatttgctttctattcttgtatgtcataatgtcattcatcaaacttgtagcttgacaatgtacgtatatatagagggagagatatgagatatgatgaatcgaatttgaagatgctcggcatacccggagcatgtctaggcaagctgttgtccggcctggacatttctataattactaaaacttgaaaaaaaaatccaggaagatattaggcatttgtcattttgccccctatgttcaatttttgtgggttgttagtttataaaaatatgcatagtttatcaagatgggactgtaatctccaagcttgggatgagcagcatatatattgtgatggttgatagcatatggcttatctcataattcatgacatcacaaactattgggtaaaggcattataataggttatagcaacaaatataaaattatgcttagctgtgcaaaattatctaattgatgactatttctaaatacacatcatgggcaaaaaggtgcgaaaagttagtggcagagtacataaatttgaaaagaattataagtagttccgtactcgacatataacaaaactaaaatattcacacatttcatctccgttactttatgcggtgtataacatgagtgtacaagctagacaaaaatgacaacaaaaatacaacttttttgttgtaaaagaaaaacaaacttatcccatgcagaaactttatgacgcaggcacaaataaagccaagaaggaaaaacatctaaagtgtagggatagaaaatttctgaactaaaagaatatgcatttttctacaaaacacaataaaagcctagtatacatatagatgtcttgttaaccgactttgtgtatatatacttttttttttgcacaactcaatacactttataggatgtctattgtttatactccaagtaactttgtaactgccttacattccaagcggctttttcttggctataaaagggacctcatgtcttgggaaatcacatcagttgagtttccattatcctttcaataaatagc

SEQ ID NO: 683 - DNA, 2198 bp, Oryza sativa
  misc_feature (1595)..(1595): n = any nucleotide
  misc_feature (1603)..(1604): n = any nucleotide
  misc_feature (2047)..(2050): n = any nucleotide
  misc_feature (2052)..(2052): n = any nucleotide
  misc_feature (2053)..(2053): r = adenine or guanine
  misc_feature (2065)..(2065): n = any nucleotide
  misc_feature (2066)..(2066): r = adenine or guanine
  misc_feature (2072)..(2073): n = any nucleotide
  misc_feature (2074)..(2074): k = guanine or thymine
  misc_feature (2144)..(2144): n = any nucleotide
  misc_feature (2145)..(2145): m = adenine or cytosine
  misc_feature (2153)..(2153): n = any nucleotide
  misc_feature (2154)..(2154): s = guanine or cytosine
  misc_feature (2158)..(2158): n = any nucleotide
  misc_feature (2159)..(2159): s = guanine or cytosine
cggtgatccacgacgagctgcgcagcttccgggtgttcctgcagtggtgcgcgctggaccactcctcccgcgccgcgcgggccgcgtcgtacgcggcgttcctcgcgctggcgctcgccgtccccgccgccgtgtcgctctcgctgcgcgccgacgccggggcgtcccccgtgtccgcgtcggcgatcacgttcaaccgcgtcgcgcaggccccggcgacggggctggcggcgatctcgttcgccgcgctcgcgtccttcttccgccgcggcggcgggctccggcagctgctgttcctcgacggcgggctccgcgacgacaccgcgttcgtgcggcgcgggtacgcgcgggagctggaccgcgcgttccgcctcctcgccgcgctgctcctcccgtcgctctgcgtcgaggccgcgcacaaggccgtattcttcttcgccaccgtacgcgtcgagccgccgctccccttccccggcgtcggcgtgccgtggcgcgcggtggcgctggtggccacggtggcgtcgtgggtgtaccgcacgggcgtgttcctcctggtgtgcgtgctgttccgcctcacgtgcgagctccagatcctccgcttcgaggggatctaccacatgttcgacgtcgaggcgcgcgccgccgccgccgagatcttcgccgagcaccgccgcatccgcacgcagcttctcgccaccagccaccgctacagggcattcatcctctcctgcctcgtcaccatcaccgtcagccagctcggggccctcgtcgtcgccctctcctccaaggacggcaagagcttcgccaactccggggacctcctggtaacaccacacagccactccgccgccgccgcaggcgtagcaatcacgacacgatgcttataccctcgccgtctcgcaggtcggctcgtcggtgcagctcagcggcttcttcatgtgcctcttcggcgcggcgaggatcacgcacagagcgcaaaggatcgtgtccatcgcgagccagtggcacatgagcatggaggccctggcgcaccacgccaagtcggcgccattgccggcggcgcccagctcgtcggccagcgacgtggacgcgccgcaccaaccggagctcgggacgacgacgacggcggcgtgcgcctacagaagcagacacgccctcggtaacaccagatgaacccccactcgcgccattttttttctgagatttaaattcactcgctcgcgccattttttgtcgttgcagtgacgtacctgtgccacaacagcggcgggatcacactgttcgggttcacgctggacaggggattgctccacaccatcttcgccttcgagatgactctcgtgctatggattctaagcaaagtcctctcttaattaattattagctcgtgttaattgttaaaatttcctcaccagtttgcaagaacgcaattatgcaatgtgtcagtaaatgtttatgagtgtggtatgtttcagcaattggacgatgtacatataatcgtctactccctccgtttcatattataggtcgtttgacttcggtcaaaatcaaattatttcaaatttgatcaagtttgtatagaaaaagtaataatntttttaannccaagataaatatattatgaaaatatgttccattatcatttaattgatctaatttggtgttgtaaatattaatatatttatctataaatttaaattagtttgattttaaccaaagtcaaaacgacttataatctaaaacggagggagtatcattctgaacttctggtgtataaatgtaaaaaaaaagattcagatcatgtggttggattagtaatgtggcaattctgaaattgacaggttgaatttgctaattgaggtagtaagtccaggttagtcgtagctgagagagagagatggttgaatttgctatagttaggcagcaacagcaacggccacagccatggccatggccatgcggccagctagctcgacgccccatctctctctctctctctctctctctctctctctctctctctctctctctctctctctctctctcnnnnanrcgcgcgcgcgcnragagannkctctctctgaatcagctctcttcccccgcgatctctcctacttttcctctccggagaaagctacgtgcgnmacccccansaccnsgccccgccgtcgtcgaggcgctggcgccggcgggctgga

SEQ ID NO: 684 - DNA, 2198 bp, Oryza sativa
  misc_feature (1161)..(1161): r = adenine or guanine
  misc_feature (2036)..(2036): n = any nucleotide
  misc_feature (2121)..(2121): n = any nucleotide
gactaccatttgttttaacttgcgggctcctttggattgatggtttttcaaagtacttatggaggattgaaaatctcaagaaagttttcatacgaggctctttgtaccaaaggaatatgaatgtcaaatttcctatggattgacttcttttcttctatctaaaataaaataatacctccattcaaatcgaaaataaacatgagtcatacctcatgttttattttggattaatttaattcatgccattacacacatgttatttcaaataagtatcattacaattcatctatttatatccatgtcacataaatttttaaaaattagaatcgttctgtcgtcatattttccatcttcttcctcatttatttgcaatcgcatggatcgaatacccttttattttcctctaagaagtataatgcaccctctttctttctctctagcacaaagaatttactctaatattcctatttttgtttctgtgaaccatccaaacacctactctgttagaacatggatcctatttctacatttttactggtactgtgcttttagatctcgcgtcccaaaagagttttgatcaacatatcagcctaccagtcatagccaaaatttaaattaataaacaaatttttagagttgattttatttttttttcatcgtagtttgtttttttatattgtcttttatgtcgctaaacacacacgcaaacgcttgagcgcgcacacactgtgcgcgtgcgtgcgcgcacgtgtgttttaaagtcagtaataagcgttagagtttatgaattatagttagagtgacataccatgtgtgtagtttcagagctttgagttagctggtagtattttctcttgaaggtttaaaattggagttaaaaagttactacgaagatcatagctttctttccaactaggtgaaaccctgcgcattgctgcgggaatttagtatgataataataataataataataaataacgtgtaaaatagctagataacatcagattaagtaaattaatgtggtttatgataatttaaatttaaatagtatgtagaatggtgattcaaacgtaaaaagtagggagatagtttggaccgtagattaatcatctaaaggctaaaaacaatttatgtgatatgacttaattagaggaaaaaaargagaaagataatttggaccatagattaatcatttaagcactaactaagtgaggatgaactatataagtatataggatatcataaaacataataaagatatacattgaaacattatgtgaattatgttggatgataatttaacatgtttgtatttgaaaagctcttaaattataaaaactataaagatataacatgtttgcatgatgtttaaatgtgatgattgttagtggatgatgatgtgacatcttattaattagtgaataatgatgtgacatctttgcattttaagcttaaggagttagtgggagataactttatagtaagataggatatgagagtattggatcgtatacacttatagcttataattaaggcaatagtcataatttttggtcaagtatttttttctcttactataaaggggttcattattattttacgactgccaatcatatatatagtttatacttattcaaaacaaccgttaaaaacttttatatgctatcgcagatttacgagtacttataggactctttgactaaactttttaagatatgatggtgactattggattgcttgctgcatctcacattctataatttcctgataacatgtcctaatcaagttttgtgaaagctcagggtttttactactttagatatgatttccatatttttaagtgataaggaaaactacatcacccaaaattattggaggtacactaaattaattttcatatagaatcttgaaatgttcaatattccatccacatgtgcattaaaactgtattctttgacctgaactcttgcactcctatctcggaaaccccctaatatgactgacttgacgcacctaaaaattgttccattccaagnttccaaccactatggttcccaccaaaccctaacctgaaaattcacaagaaaaaaaaatcaaacgcaaagaagaaaaagaagcgantgggagacatgccctcctctttcctctctcctctcctctcgccgtcgccaattctctcctcctccttcccccgtggg

SEQ ID NO: 685 - DNA, 2199 bp, Oryza sativa
  misc_feature (1040)..(1059): n = any nucleotide
  misc_feature (1064)..(1064): n = any nucleotide
  misc_feature (1118)..(1118): n = any nucleotide
agggaggaggaagaagatgaggggtgagtatgacatgtgggtcccaccatttttttattattttgtatgtgaaagtgacatgtgggtcccatagactttatttttttttcggatcgaattgccacgtaagcaccacgtcagtgccatgtcagatgaaaaccgggtcaaattagccacttaggcgccacgtcagccaataccgctatcaaaacccccgagggacttccggttttcgtatgttgggggacgggttgtacccggttttgtggttaagggacgaaaatcggactggacgacaaatagagggaccataagtgaacttattcctagaggcgtcatatgcctcacacagagcccatttgcagcccatcttgacgtatgcagcagtttcatgggcctggtttctggcgttactcgtctggcccgaaaaccactctattaattccatttgcatctgccttcgcgaatcgcgattgttgatggtagtagacggcttcagaatttgagtgcaggactgttaacattagggagcttctgtacacgacgaagcatgtatctccccatctgagacagacaattcttcgagtgcgaagcatccgtggcacttctatgtgcacgattcctcgagtgctacaaacggtttcgctaccaacaacggctcgtgttcttctgaaggaatctgacgtgacgtgcagcggcagggcacttgactgaccgatgagttcgttgctttcccggcccgtttgccactcctggtacgcttcctccttggataatactactcctactactactatattttggtttctactaatgactattataatttttttgtgaaccgtagactttggtgttggctggcgttctaatcaatcaccaaacgttctactactgcatatactactcctatacctcttaaatattgcaccactagtactatataaaaatggttatgaaatgacactgatatgtactcagtaaaagggtgtttggaaactagggactaaatttagtccctctcataaaagcataaggtggcnnnnnnnnnnnnnnnnnnnngtggngctaaactttagtccctctcacaaaaaatttagccccactttagtccctccaancaaacaccacctaagtgaccaacattttacttttatagtactccgtattaagcctcttgcagaaagtagggatctgctcggttactactgtagtaaggttgtgtttagatccaaagtttggatcctccttttccatcacatcaacctgtcatacacacataacttttcagtcacatcatctccaatttcaaccaaaatctaaactttgcgctgaactaaacacagcctaaacaaatctatttctataggttaacctactccctccgtaaagaaaaataaatcaaaacccaaaatcggttttttttacgaagtacgtgttttccaaaagactattatgatataacttgtcacgcatttattcccaaatacgaccatagctaaaattttgattgagagaaacaaatttactcatgataacatggataaatctatattagtttatttttaattttacggtattctaaatttattctaaattctactactagcttaaaaattaaaatatcatatataataaccaacctaatagcccacccacacaacagtcaattatagatctatattacatcattaatatctaacttactcacctctcacataatagtagtttattagagtacgtattacagcttatgaatctattcatttcttctctcattcatgtgtcatttacatcatctttgttatactcagctttaagatgtacactacatattttttttctcacaaatttgttatactcactttaggatttacactgcatatttttcccacaaaaaaactctgataccctcaccaactaccagtcagaacccgtttctatcacagaacaatcgtagcgaggggaggggaaaaagacgaccccgaatcgccttaagacagtgggtgttcttgtcgtgcgcttcaccgtttgtcttgttggacccggagaccccacatatccagatctgcaagcttcctcctcctccttcctcctgatcctttagcttcctatatacgattccaccatcgaaggccagggcccagacttgcttgccgcaggttactgatccaccgaaggagggaggcgcccgcccgccgc

SEQ ID NO: 686 - DNA, 2199 bp, Oryza sativa
  misc_feature (1258)..(1258): n = any nucleotide
  misc_feature (1275)..(1275): n = any nucleotide
  misc_feature (1298)..(1298): n = any nucleotide
  misc_feature (1386)..(1386): n = any nucleotide
  misc_feature (1389)..(1389): n = any nucleotide
  misc_feature (1578)..(1578): n = any nucleotide
  misc_feature (1839)..(1839): n = any nucleotide
  misc_feature (1862)..(1862): n = any nucleotide
  misc_feature (1889)..(1889): n = any nucleotide
  misc_feature (1901)..(1901): n = any nucleotide
  misc_feature (1907)..(1907): n = any nucleotide
gggaaaacaagtaagtctgaatttctttggccacaggcgacagccccaaaaccccgacaccccaccgccgaccacctcgccgccggcggcaccgctcccctttgccgccgtcggctctacctccttcccactctcccgtccttctcctagcctccctcctctctctctctctctcaatacttttttctacctttcatactaccttccatgttcttgttccgaatctgggttcccaagccgctgatgcgccccttccctgattcttctgatggaactaggggaggctgtgtggccatttttcccgttggagggtttcgtctagatctgtcgggtgtgggacatgcggattgcaggtgctgtcggttgtgttggcggcggcgggtcctgccgggatagttggccgccgacggccgcttggctgttgggttgcacggtgtgtgctggctggtagcgaggatggttttagggtgttgggcgaaagctctgtccgactcatagccggcctgacggcgatgaacgtccttggacatcatgcaatgcccctcctggaggcgtcgtcgcaagagcatctccagtagagaccctaaatacaattcctaaacagtttttaggtgctaaggacaaaaaataaactccagcaaaacccatactacaggtcctaaaataggaaggacctcaaatacccctccgcagtccctaggcctgggggctgtagaccgaggccctatcgccgtttttctacgcgggaggaaatttcctgacgtgtggtgtctgtcttccctcccgcggaatcgctgccacggcgccgatcttcgccagctcgctggttccgccgctcgtggccgacggtgcgaccatccagtacctccaccggccactgcttgtcgtccgcgtgcccgcttgcttgttttttcgtggtccttgatcagttcgcacactgatgcactatatggtagacaagaatgttctgaaattcatgaccatcagaaacatgttctaaacaatcctgctctcgattggtttatggctaactgtggttctaaacgatcatggcataaaaattattgttctgttcctttaaagtttgtggtgcttggtaggttgagacaattaggctgcttgcaattatgcagtagttccttcaaagattattctgcagtgttgttcttttgtgtcagttgtgagttgaagtttaacttcaaggttttttttttctaggaggatttaagctctttctgaagtttctcagatagattanattggaaaaggtatagngttaattttatctattgattatngttcttatttaattgaactacgtagtgtcttgaatacttgccggtaggatttcactcccatgtttgagaattttgaatttgaattatngtntttaaaattatggatttgaatacaattgaattctatacattagaaatattcgtatttgaattattactatgttaaactaggtgtaagcatagagtataatcagaaatacaagagaaaaagaaatgggggctaagaaatagggtctgctggtagagttggaggtaatttttgaattcttagaaaataggnacagccctcattcaacctttgaggactctaaaatagggactactgctggagatgctctaacaccctgttcccccttgctgctgggtgaaaaccctttccagtctcctgtttatgcgatggtggcgtcctttccgacgtcgtcaccttcttcaaggcatcgtttttggagaaaccctgcaaccagtccccctgctttcccatccttctcccctattccatcccctcctcctccccttttcttctgtcaagggctcctatgcntggaaactctcatgtatctcttntctgtaatatattcaggtggggaaatnttggatttttantgattngaatactgtattgggtcatctcggtgacaccaaagctgtactttggtggagtagcaatctttgcccttattgaccggataggattttggttaaatttatctacgtttttgtttgcggttcatcttttttcctaccagtcttatacaagatggtacagtttagcaactgattgttacattgcaatatataaatcgaagtgatagaagccacctcaagtaaatctaactattgttcataattcaaaggtcaagaccaatttctcagttcctgcgactgcgcgaaaaaacaaaac

SEQ ID NO: 687 - DNA, 2199 bp, Oryza sativa
  misc_feature (1911)..(1911): n = any nucleotide
  misc_feature (2020)..(2020): n = any nucleotide
  misc_feature (2128)..(2128): n = any nucleotide
cataattgtttacacacatcacatcaatccataggaatttttctaaagaggtttgagtggatggaaaaattcccatgcttagggccactttgaatcacaggaatgaaaaaacggaggaataggaaaaacattggattatgataggaatgtaagtgtaaaacagatgattgcaaaacacaggaaaaacataggaatgaccgtttgattggaccataggaaaaacacaggaatttgaggagagataaagactcaagatatttcttccatgaggttctacctcttgttaaaatttcttcaaaacttgtatgggaagaggcattccataggaatttcataggattacatagggttcattcctttgattcaaagagttttgtaggaaaaatttctataggaatgaaatcctctaaaattcctatgaatttcctttgaatcaaagagggccttgctctatgcaacttgtaggaaagaaaattcctttgaccctatacttaaattctacaaacggaattacactcgaagaaattaatggttaggaatccaaatcctttgttttttttctccaaaacgaacgagccctaaacagcaacgttataggcgtcgccgtcagtggacggagacatgcgcgtgagccgtttggtcgtccgttcccccaaagtggccaagtggacgcggacatcattgatcccagaatactggtacaaaaaattttgaccatgtgcgaggcttccattcagcatgcagtttatttccccttcctccttccttcctttccttccatccaatgcacctagctagagatgataatagggtcccgtccccaattttccacgggatattctcctatcaggaagcgaagatggttagagttagatctttgtagaaaattaaataggaggtattgtatttttatcgggttttcgcggtggtggggaagtcctgtcccccacgaagactcgcgtagggatcaaattaagtgtatttttctacttatcttttagtactatattacttgtaattttgataaatgataatattacgttttactatgtgaattagttgtaatgtgttacatacttcctccgtcccataatataacggattctagagttcttgcttatactgtttgactactcgtcttattaaaaaaaattagaattattatttattttttaacttactttggtatccaaagtactttaagcacaacttttcgttttttatatttgcacaaattttttgaataagacgagtggtcaaacaatgcaaataaaaacttaaaatcccttatattataagacggatggagtatataatttgttacgtatatattgtttttaagtggaataacccccaaacaaagatttattctccgtgttacgatggggatgagaagaaagttatttcctgttatactctctccgtcccattttaagtgcagctatgattttctgagtccaactttaatcgtccgtcttacttaaatttttttttaaaaaatttaaaaacataagtaactaataaaatactattcatgttttatcatctcataccaacaaaaatactatttataaaaaaattaaaataaaatagacaatcaaagttagacacgaatgcttatgggtacacctaaaataggacggaaggagtatttcgcatggacggggatggatagatattcttgggtgggaaattctctcattgccatctactcccagttgacagcagtagcaccgaggtgaggactgaggactgagtctcctctacaggaccgttgaaacgccatggcaccaccgtcgtctccactgctctctcccctccctccctcctcctttgaccgcgccacccttcaaacttcaaacgcccaggtcgccccgccccgcgccgcccccccagtcttctccccagtcncctcctccgaaccccacctcgccacgcgcgcccatgcacgccacgccacgccacgccacatatacatacgcgctcccgctcgccgcgctctccacaccaaccttaccanctcccctcccctcctcaccacgcgctcctccctccgccgccggccgccgtgttcttggccgcgcgcgcgcgcccgccaaagagggcgtgtgtgttccttccttcttgncagcgtgcagcagcagagcgcctgtaagctgtttgattcttggcgacgaggggctagttcgtcttcttcga

SEQ ID NO: 688 - DNA, 2199 bp, Oryza sativa
  misc_feature (945)..(945): n = any nucleotide
  misc_feature (950)..(950): w = adenine or thymine
  misc_feature (1101)..(1224): n = any nucleotide
  misc_feature (1227)..(1227): n = any nucleotide
  misc_feature (1256)..(1258): n = any nucleotide
  misc_feature (1336)..(1336): n = any nucleotide
  misc_feature (1387)..(1387): n = any nucleotide
  misc_feature (2034)..(2034): n = any nucleotide
  misc_feature (2038)..(2039): n = any nucleotide
  misc_feature (2041)..(2042): n = any nucleotide
  misc_feature (2089)..(2089): r = adenine or guanine
  misc_feature (2090)..(2090): n = any nucleotide
  misc_feature (2139)..(2140): n = any nucleotide
  misc_feature (2171)..(2176): n = any nucleotide
  misc_feature (2179)..(2180): n = any nucleotide
atgaaattagttttttcattcgtgtccgaaaacccttttcgacatccggtcaaacgtccgatgtgacacccaaaaattttcatttcgtgatctaaacatgcccggatgtaagcctgtttgcacgcacagttccttccctattttgataggtacagttgaccatcatgaaacttccaggactcttctggctagcttcatatggtggtgggctagacgatttgagttcgaagcctcaccttttctaattatttgatattaggtcattccttagtattcgcgtcttttaggtaggtacagttgatcatcggtcaaacatcaagcagtgtatctatcttactctctgtcctaaaataaatcaacttagattatgatgtgatataatctactataataaatatatatgtcctaaataaaattaacttagattgtgatgccatataacctactacaatatatttaaatagaggttatcttattttgtgctaggtcgatttatagatggttcgtacacaccgtccgccgctagaaaataaacagaggacaatttttctttctcctagctactcccagcattcagaatctttttttgctgttggaatcacgcgaaagatggataaatatacaggagggatagccgaggatatcggcggtgcccatatccagtgcatctgatcggcggcgagatgcacgagagtgtgatggcgagcgctgtgaatcactgtgaggactgaggagagctgaaaagcatagtgcgggcggcgaaaagaggaggattcgggcggcgccgcgacagaaatatctcgttgtgtatatctcaacttctgaagacggaaggtggcggtgcccaagtgccaccggttaattagctgctgcttcactgaaagctccgtttcgaatccaggtgacgggcgccatcgaccaatgatttgtgactagattctcaanaaatwaaaaagatttgcgactagattcaggtaaagttgagtgagtgaaaggccggcctccttatttggcttattcgagaaataaatgaaacggtatatttacaaccgaaaaataatttataaataaaagttttatatacgtactcttagcgatctnnnnnnnnnnnnnnnnnnnnnnnnnnnnnnnnnnnnnnnnnnnnnnnnnnnnnnnnnnnnnnnnnnnnnnnnnnnnnnnnnnnnnnnnnnnnnnnnnnnnnnnnnnnnnnnnnnnnnnnnnnnnaanatatggccttcggtggtatccacgtagannnttacgttaactctgcttaatgattagagtaagattaaaaggtgatagcgttgtcaaccataaaaattctaggcaaaanaggtgtcgaacgggatcaaattcacagttggcgcgggggctgtgtacaccnacacgagatttttcgtgaagcaaaaactcgtggatggtcaatttcttctctcccatcacatgacacggtcttctctacttcattgctgacccaagagaccgtctcatatgcttcatttcttctcctcttctcttccccttcgtccccgacaaagcaccacaactccgcaagttttctcttttcttttttccccttctctctttcgcctactccttgttcaatcgattcttcccagctacgcgactcttcctcgctttctcgcttctctctctgcgccactgtggatcaagaaacagctttaaaatccaatcttttttaggcacctgatgcctcgtcggtagcagtatattttcaattcgttatttttttagagcttagaatctactggcagcttggatttttcttgggtggttgctcccagtgatcggccgcattgcttgcgtggtggcacaccgtcagctttggagtaacctgtaactgcaagagtgagtatttagtgctcgctttcggcgattcttgtttgcttgctcccttctctgctcttgtccggatttggtatagagagcaatttcgagtgattcttttcctttttttctcgaattgcttttttttttggtaggtttgtttggcgtaagcaagggtgaacnacgnngnnacaggcgttgacgatcgctcccgccgccgccgcggattctagcccgrncccggcccgccacgtcggcggcggcgaaggaggagaggcgggcttgcgnngaaacctcggatgaggataaggggagccagnnnnnngcnntccgacgcggaggaccact

SEQ ID NO: 689 - DNA, 2199 bp, Oryza sativa
  misc_feature (1476)..(1476): n = any nucleotide
  misc_feature (1556)..(1556): n = any nucleotide
  misc_feature (2174)..(2174): n = any nucleotide
  misc_feature (2176)..(2176): n = any nucleotide
  misc_feature (2179)..(2179): n = any nucleotide
caatatactcaataaaacagacaaacattttaaatggagagagtaacaagagaaggcgtgatttgatttggaactacaactagaaaccagaaaactgcaattgtcacatttaagttggatgccatcagatttaactaatcctttgccatgtgaatatcctatactagtagctaaggtgaagcactgcattttgatgctgcattgaatgagctatagtctcaaaattttcaacacatgtgagtacaaactacaaactcaagatacaggtcattaatgaaccacttctctcacagttcacaatcaactcatgtgctccagaaatgccaacttgcaaagcataaattgtaacataacatataaatcctggtctacacaaggacaccatatcattatcacaaggactgcaacatagatcaacaatttgtggctaataatgcaaaggggaaaatcagggactacaagggccaacatctgggcatataatgcagacttagcactctccatattgaaaggttcaatcatttaaaacacatttgataattgttgcatccaatccagcacccctgtcctccttcagcgggcaagccaatcttacaaaatttagcaaaggcctaagtaaagcaacctaaaaccctacaaatttgttcacccaaaataatctagctagaaatgaaatgaacatcacagaaccttacacgtggctaaactcacaaccaactcatgtgtctctaaaagtgcagagctgccaagcataagttgcaacacaacatcataaatcctagtctacacaaagactattattatcacaaggattacatggatcaacaatctgtggctattattattaatagggaaaaatcaggtactctaaagggccaacatctaggcatataatgcagacttagcacggttcatactcaggaagcatgatagctcccatcattttgaacacatttgacaattgttgcatccaatccagcacccctgacctcgttcaatgcaaaccaacaagtatcttacaaattctagccaaaccctaagcaaaacaacctaaaaccctacaaatgcgttcatccaaaaaacaatctagctagaaatgaaatcgaagaaccctaagatacaaggcgagtagagctcacctcttttcgcctccggtgtataattcctgcggcggcttatactcgtcgtcctccgagtcctcggaccccgcgctgtccttgccaccgccgagatcggagagcgtccgcacattccccttcccgctgccgctcccgccacgcgcgttttggcccctcttcagcctcttcagcggcctcctccgctcgtccgacgccgcagcctcctccgcggcgagggcggcgtcctcgtcgtcatcatcgtcccccttcccgtccccatccccattcccgacgtagtcctcgtcgtcctgatcctcgtcgccgccgccgacgacgtagtcctcgtcgtcggagtccnggccatcgctggcgggccggggaagccggggcttgccgggggtaagatcggccgcgtcggcggcggcggcggaggcgttnccgtcggcggagtcgtagaaggagcggacggcggactcgagggcccagttgtggctctcgaggaagaaggcggcctcctggggcgtcgcggaggtgacgccgcagaaggactccaccagcgactgcgcctccgcggccggtggcgccctggcggcgtccccggcggccatctcggtgcggggcggcggcgcgtcgtggggatcggggggggtttggggtttggatcctcctctccccttcggcccccttgcgacttgaccaccaccgcctcggcgtttgggccgtgacgtaagataatggctcgcgctgtgtcttggagaagaagatttgggccgaaaggcgcgttgatatttattgggaataagttcatctaaggtcccttaacttgtcaacgaatccgattttcgtccttcaaccgcaaaaccagatacaacggatccctcaactatcaaaaccggtgcagattacgtctctcggcagtttttatagcggttttggctgacgtggcgcctatgtggctaatttgactcggtctcgatctgacgtggcgcttacgtggcaatttgctccagaaaaataataaaaccagtgggacccacatgtcagtttcacacacananatnataataataatggtgggacc

SEQ ID NO: 690 - DNA, 2198 bp, Oryza sativa
  misc_feature (1264)..(1264): n = any nucleotide
  misc_feature (1445)..(1445): n = any nucleotide
  misc_feature (1448)..(1448): m = adenine or cytosine
  misc_feature (1533)..(1533): n = any nucleotide
  misc_feature (1542)..(1542): n = any nucleotide
  misc_feature (1667)..(1667): n = any nucleotide
  misc_feature (1810)..(1810): n = any nucleotide
ggctgcatcggcttcgatctccttcaaaggagtaagccctatgttccgtcggcccttgaattatgtcggctgcattggtgttattcatggctgtatcgctttgacctcttggatcactctggttcggttgatattttgcctaactgatatttcgattctatctttaatcacattgtgtttagagacacattagtttagttgagactgtatcggttaggtctggtcttctgtcttagacgatatatctctacaattacaatgttgttttaaatatatgtggtatgtccatcatgttttcataggcttatcggcttattgagtattagattattatatacaatcatcggttaggtttgacctactacattattgttgataatctaagtattgttaagtcgataggtttcttacctatgttttatcggagtgctagccaataaattatttgtgcaccagacttccagccaacgtaagttttaaccactgagccaacatttaatattcagcataaatatcgtcgattggttcatcgggcatctacttcattatattataatcggctgattggattgtttgttaaagttctatcattgtttatacaagtgttagaatctatatcggacatatagtcgattgttcaaaattctatggacattggctagtatcgatatcagctaatatcgctacatttgcttgttagccgatcggcttttcgatcatttacatatttatatgtcttgttagtcgcaggatcaaactgactagcacgcccgtatctcatcaataatttagaacctgcactagcgttttttttcggagacctgcactagagttaagcagatctcccaaacaattgtgttgtttttcgcgtcaatggaggtgagtgttacatcgataatggtgcgcttgcgaattttagatgtgaccgtatcacaacgacgactatgtagttttttttttttgttagttctcaactttatctttctctttttcacacgcatgttttctcaactactaaatgatatgtattttacaaaagtattagtaagaaagttactttagaaaattatattaaccaaaattttaagttattttaattaatacttaattagttatgtattaatctatcgttttccatgttgcatacgaaggggaggaggagttgagaataagtcacatcaacagtaaataaagtcaaactcgcgacaggcgtggccgacctcaaccacacccgaccgtccactgaaccgggacatcctcacgnctctccccaatcccctatcccccaaacccgtccagatccatcgtgccagctactatagctcccaaacaccggtcgtaactcgtaaccccgtacggagcgtgtcggtgtccggtgtccccccgtatctccgtgcccccccaccacccacccacctacccccgtcacgtgccggccatcccanccmaaaccagctcgttttccgcgagaacccacggccccctcggtctcccctccgtctgcagggagccagacacacggggtcgcggccntacgtgccntgggccgtgcggcccccatcgccgtcctcatcctgatcctaatcccaagcgaccgcggcgcgatcacgcggcgaccaaccatttctctcgtcgacgagacgacgtgcccgccgctcgccaccccncccaaccgctcgcgcggcataaatacagcacgccacgcccatccctctccctctcaccaacaacagtaacccaaccagagagcttgcggaagcgggggtttggtgcgggcgcgcgcgtgtgaggggggagagaaggccaggangaggcgacgccgtcgcccgagggaggcaaaaatccgatcctcctcctgccctgctcgctcgctcgctcgcctgcgctgcgcgcacttggccccgtcccgtccgttcccgctcgccaggtgatttcttgcagccatttttccccgagattacatggtttgtggggttagttgggtgggtggtgatgccattgttgcgtcgaatggcccgctggggttggatttgaggtcgcaatcctcgtcggtgtgccccgaatagagtgattcttgtctgcttcgggggatctcgatttggggattaggagaagctttacaatcttctcgatagtatacaagattttctttctgatttatctgctgtttttgcgctcaaaatgtgcaggcatagaaa

SEQ ID NO: 691 - DNA, 2198 bp, Oryza sativa
  misc_feature (1548)..(1548): k = guanine or thymine
  misc_feature (1560)..(1560): n = any nucleotide
  misc_feature (1563)..(1574): n = any nucleotide
  misc_feature (2144)..(2144): n = any nucleotide
tcaatgtgttgggttttttttacagcaattcgagaagcgtgcatataaaaaatgagaaaatagaatatgagtgcttgtacttccaaagacagctttaggctgtgttgaacaggacatgttggtaactaatcttctctacacgtaaaatggaatggcttattagtacatgattaattaagtattagctaaaatgcttgaaaatggattgatataattttgtaatgcaacttttctattttttctataaaatatacactgtttagcagtttaaatatcgtgcacaataaaaatagggggggttagaaattggaaaaaggggagtatatatataccgcagccttagaagaggtagaaacaaatatggataagattcagacagaattaagcattttattcccttctgtgtttttttccatcttagttctacggtgagcagttgcagaccgcaaaagtgcaaaacatgtctagtttgtatgcacgctaaccgctaaggcatgcatgcatatggtcgattgttgaatgttgactgagctaaattctctcttatcactccgctttcattatcagcaataaatctgttaactttgcattgtccacaaacaaaagaacaacggtaacaaagcaatacatgagaaaatcgcgtggatttagaattgcgtgttgtcaagacaaacacttcattatttgcatattggataatcatattagatcaggttagaatggtgtaacaaaattcagaaagaccgcttcacgtttataacgcgtacctgaactatccaaccagacactatattgtttgtttattgtcagaggaaatggaggaatggaacgcgtcagttatgacaaagatgaagcaactgtgtcgaacacctagtaccgtgtccgaagaaccagcagagttacggtgcatgctactatgaaaagagcaaattgaagcagtaaacagtgacagcgacttaggattgctcgtgcagttgcttggtttttccttgctgatagtgaatgtaggtgaagaacaaaaactctttccgaagaggtctcgctgtctcacctgtcttcttgtagtttgactgttattctgagcagctgatgtaatttcaagtagtagtggataagtgccctgcgtgcacattttaatcccgctggaccgttcatgcttgtacagaaattccctctctctttttttaacaaagggagggaattccgaccttgcaggtagccaccttaaagattgagcacatttcctgaccaaattacagtgtttgttctgaactctgaagttcagtggtggtacctaaacgtgatcgcaaagaacaagaaacctgaaacttacaagaaaaatggaaaagtacccaccacatgccgaattatctttgacggatcttccacagataaccttgatacggtttcttcagttttctccagcacgggtcaaagacactgaactgaatcttcttctgacagtgaagcagggaacaccacattaagccgagacgcatctttccgtagatagccgccgaggtaaattacggacacgtttcagcatckaagctagaagantgnnnnnnnnnnnntcgagatagatagttgttgccacggcggcacgccgtcctcaaaaaggcgcagatcgcactccggacaaaagtgcagtagtagtctccttcaggagccaagactaatcggagcagctgctagcctgccacagccagccttcgcagcccgcgaccagcacagctcggaaatttcccgcacgtctcgcgaccaaaaaccattacgaccaactgcttgcttctcgatctttaattaattctgcagtggactagtattttacgcatgtgcgcgctaaaatagagcaatgaaaccgtgcaaggaaagcataaatgcgtaatagtagtataatacaatttgcgttcacctaaaaacgcagagatttgaattgatctcgcgctgatattttttatttttctcactggggtgggtagatggtgactgcggccagggcgcttacctgttctctccatctctctcgcgggaagcgtatataagctgccctgcttgccgctcatttccatctctcgtgctcagctcgcagccaaaaaccccaaggcgctctcacgacggcaggagctagcttagctgcaganaaagcaggtaacgttgaattctgatttctgaacgagttgcagcagcatagcgac

SEQ ID NO: 692 - DNA, 2198 bp, Oryza sativa
  misc_feature (904)..(904): n = any nucleotide
  misc_feature (915)..(915): n = any nucleotide
  misc_feature (1710)..(1710): n = any nucleotide
  misc_feature (1852)..(1852): n = any nucleotide
  misc_feature (1856)..(1856): n = any nucleotide
  misc_feature (2170)..(2170): n = any nucleotide
ttgcgttctctcgtgagaatctcatcgcgtgatgatttcgggcagtggaccggtgtcgcgcatgtgcgcgttaataaccatttgatagccacgaatcaattagaacatgtacaatagcaggctataaaccagctataaccacatatcgagaagaaaagagaagagagaagaaagcggactatagatttatagccggctgcaacacggactccaatacgttatgagtatataagagataggaccgaatattaatgatgtagtatatttttatagataactattatataaatgggctattagattgactataaatgatttggagcccagttggctatactattgaacttgctcttaacaagtactacaactgcagcgtttgaaccgatctcgcctcgctctaataacacttcatcttccgagttccgattgtccggggttggtgagttggtctgttggtggccggggcgcgggcgcgcttacctgttctccctcgcgtggagctctttgactacgcccgccagctgcgcgtgtgtataaccttgcttgcttgcctctcacagccgaagtcgcaggcgcagtcaggagctatcgggaaaacgggatttcccccagctttccaaggttcgcgggtcaatctcgcagtgatactccggcggcggcaatggacgccggcgaaatcatcgtggcccagccatcgccgcggctgtataaggtatgtgaaacttcatgagcgagctcgccgtcgacccaagcttagggagatatagggattgatattatcggtgcagcagtgcgtgattagttgtttagtttagcttgcttcttaatttgagggctttcatttggagtttataatctgattgtttggattgcttttgtgcagagtttgactttccggaggatngcgacgaaggnaaggaccatttccccaggatgaagagatgaaggtaagcacctcttgatcacgtttgaactcgtcctctgttgttaattagtcattaacttgcgtagttgtagtccgtagtaatagaaaaacttggcgggcggggtgcgatgtgtgatgatctgctgcaagaactgagaaatttttgcgtcaaaaaggaactgagaaatttttggataatggatcacataactcgtcttctaaactctaataaatggatgtatacgaccattttgtgcattcgttttagtaaaaaaagcagctacacattgttttcttgtttttgctagtactttaatatagtatacatgctatattgttggtttattacggattccatttttcaggtgtcctatggtaataattttcgcaagtgtttttttttgaattcatcactgcagacaacaagaaatatgatttaatggtcaaattgattaccctgcaaattgtgttgtgacaataaaatgatattctcaatttcaagaggccagcatgcaatttctactatcataaaatagtgaaattaattgaccgtatcaagaactgtacacaactgttaggtttttcaagttattgtactagaccgtatccacctgccagatttttgttctaaaagcgtaatttattttatattaagctattatcaatatctcgatgcaaatgtgtgttcttttttattaaaagattctttcactagggaaaaacgtccggccaatcaatttgtcccagcatagtcgccctatgggctatttttataggccttaggnagccgtaagccctgttgaaaaaaaaaaagactcccagctcaaacccagcccaaaacatctgttaatttggttttacatgtaaaatcattgggagcccgtagattcagaaacaaaggtctcaaattggatatttttcttaatntttntattatttcatattatttctaaaagattaaaaaataaattacagttttaaagttttgcaaaaatttactcctcccgccctaccgtagagcgatatatgtgacatggcaatccagggagggggtgccgtggcaattttgcataaatcgccctcccctaggacgatttattcttgagaaggagccatctataaaattgtcatgacgcaaaatttagtgatgcatcgggtgcgttatggcaattttacaaggctcccacccgaggagaaatcgccttcctgtaaagtgatttatctttcaagggggccacctacaanttgtcacggtatacctcccacggggtgc

SEQ ID NO: 693 - DNA, 2198 bp, Oryza sativa
  misc_feature (1)..(40): n = any nucleotide
  misc_feature (165)..(165): n = any nucleotide
  misc_feature (174)..(174): n = any nucleotide
  misc_feature (1205)..(1205): n = any nucleotide
  misc_feature (1210)..(1210): n = any nucleotide
  misc_feature (1212)..(1212): n = any nucleotide
  misc_feature (1220)..(1220): n = any nucleotide
  misc_feature (1241)..(1248): n = any nucleotide
  misc_feature (1252)..(1252): n = any nucleotide
  misc_feature (1256)..(1256): n = any nucleotide
  misc_feature (1262)..(1262): n = any nucleotide
  misc_feature (1272)..(1272): n = any nucleotide
  misc_feature (1317)..(1319): n = any nucleotide
  misc_feature (1332)..(1334): n = any nucleotide
  misc_feature (1341)..(1343): n = any nucleotide
  misc_feature (1347)..(1347): n = any nucleotide
  misc_feature (1349)..(1349): n = any nucleotide
  misc_feature (1356)..(1358): n = any nucleotide
  misc_feature (1377)..(1379): n = any nucleotide
  misc_feature (1405)..(1405): n = any nucleotide
  misc_feature (1407)..(1407): n = any nucleotide
  misc_feature (1454)..(1488): n = any nucleotide
  misc_feature (1984)..(1984): m = adenine or cytosine
  misc_feature (2007)..(2007): r = adenine or guanine
  misc_feature (2017)..(2017): y = cytosine or thymine
  misc_feature (2037)..(2037): y = cytosine or thymine
  misc_feature (2073)..(2080): n = any nucleotide
nnnnnnnnnnnnnnnnnnnnnnnnnnnnnnnnnnnnnnnntttaattcgttgcaattaaatcttgaaaacaagaccacacatggatatattccggcgaaatttttttttagcttattattgaattatttttaaatgttgcacgatgttccaccaagtatatcggnattgtttcnctaagtagatcgaaaatgtttcaatcgtttaaattgggcgttgtttcatcttatataaaaacaatgtttcaacaaatagcgaaagaatgtttcagttcactgcaacattagatctatacatagtgaaacattgtgagtacacgaggtgaaacattttgggtggaacaaaaaaatgaaacgaattcccttaatagagggtttccaaaatatgttggtgatttgttgtaaaagaatgtttcgttcactgcaacattagatctatacatagtaaaatattgtgagtatactaggtgaaacatttttggtggaacaaaaaataaaacaaattcccttaacagagggtttccaaaatatgtgggtgatttgttgcaaaagaatatcttaattcactgcaacattagatctatacatagtgaaactttgtgaatacactgagtgaaatatttttttgagacacgtggtgaggctaggggaacgtgcgcatgtggggggtggagcgccgatcctgctccacccccgtcgatcgcccgggcttgagcattttcctttattatatcataatatgcttggttctaaaagtatattatagtagagatgactagaactcgaaatcatgcgcaaaatttgttggaaagagtccttttttttttttaagtatagcttccaaaattatatttcggacacggtgtgattccataaaggatatgttcatgaatgaatttatggttttttctcattaaacgcgaaccatatagtgcaaaaatgtccatgatacacttgttctggtatttattgcataatgtggctataccttatatattaattaattaatttgtactcattactctgttcaacgcttacgtctgaagatagacaacgacgcgagtatgatacactctcattaaagcttttaatttggtcttttgtccacattgtgggctaaaagaaatcagcaactctacttttcaactttgtgcttgtaaaaataacaaactttgtgcttgcgttgtttttggttagctcaattcttnttatntnaacttcangtaacacctgaaattccattnnnnnnnnactnatanatatanaaagttagancaaccatgtgttcagtttgttactagctagtagctaatagcctannngttgcaacgaacnnnctaatannngaangngttgtcnnnactagtaagtcgattacannngtaacaccaaaacaatcaacacttcnangatttctatgatttttctattatacaaacattcattagtcacatgtnnnnnnnnnnnnnnnnnnnnnnnnnnnnnnnnnnncaatttatataaaaagacatgactaattaaatgggcttactactaggtgggtggtggtggtagaaccatgaccaccactaccttcttttaatgtagtatagaatttggctcggatttaagttagtcatagatttttagtcctcatgtgaaaaaaaatgcttacaaaccatagactggaattttttgaaacaaaatatgttatttgtgtaaatatcggatagatatattagtggtttttctaacatgtgaaataaaatatatacaatacaatatataatcaacgacacacaaacaattataagttttatctaggatatttccactacatagcaccagccacacccacaacgctagcccttcgctctttttccttgaaggttaaccaaaagaaaaaaaaaacccacatcactccacgcggcaaaaaaaactcacacaaccgcaacacacaagcagcagaggatgcagtgcagtccgttcactgacacgtgggccccamagacccccgggtccacgtgccartgagcagccytgaagccctgggagatgatytccacgggcaagcagcagcagcagcgcccggttacnnnnnnnntgcggccgttttctacaaatccccccctataaataccccaattcaccaacgccccttcttcttctccaactccctcccctcaagaagcgaacaagccagaactcctccaactcgcctc

SEQ ID NO: 694 - DNA, 2199 bp, Oryza sativa
  misc_feature (702)..(702): n = any nucleotide
  misc_feature (1117)..(1117): n = any nucleotide
  misc_feature (1155)..(1155): n = any nucleotide
  misc_feature (1164)..(1164): n = any nucleotide
  misc_feature (1715)..(1715): n = any nucleotide
  misc_feature (1722)..(1722): n = any nucleotide
  misc_feature (1726)..(1726): n = any nucleotide
  misc_feature (1728)..(1731): n = any nucleotide
  misc_feature (1853)..(1853): n = any nucleotide
  misc_feature (1862)..(1862): n = any nucleotide
  misc_feature (1962)..(1962): n = any nucleotide
tcttttacaattattactttctacatcagaacttcttaaattaatctcctaatatttaatttttttcgtttgtgctctcgaataactattctaaacttagtttcatccatcatccaccccgagaatgtaacttgacgataaaatcaggaacaatggaacaaacaatatatcattatatagcagattcgtatcaagcactccatatcagccttgtaagaaaaagcgagatgatgtttcccatgtctgaaaaacacatttatgtgtcgaatctatacatctactattaaagatataggatgtttatgtacttttgtccatctcccgctcccatcgcgcctctacgtaggacacaacatcgaatcgaggtgatcctgcatggccatatcatgaccgctggtaagccaaatcactcccaatgcatcgctcccgctcaattgcataacgagccactagaaaataaaaacattgcatatcgatattacatcggataaagtctctcacacccctcatgtgccaccatggccaacagtattgtcactcgtcgacacatctcgcacatcgcaactaccaaaactagaatccccacatctagaaacatgatgctctcttgttctcgtccatttccacatcgggatcatcgattcctcccatgcctaacatcattgaggtctcatatctggaattggcattccgaccaacgtngacatcctctttggataccacaacaccatcaagtttgcgactctcatgaatcaagtttgcgactctcaacgtgttttgcttaaaatattttcatggatctctcaccgcagcctagcatccatccttccatatcctcctattctctccatatatttgtgctccacgagaggaataatagtagtaccacatggcaatgtgcaacatggttgagtcaaaccaactcaaccaagtatcatattggttttactcaaccatgttttaggtatttattttatctttcactccctccatacgtaacatgagtacccgtatatatatatttcttgtagccttatttactgttatgactattgttgctgtgtgtacgctaggtcatatgacaaaggctttgccaaacgtgcggccctgccaaacntgcaagagctaacgtgaagcctaaatcataaaaattgnaccttggtnacctaatttatgtctttttccattataatgtacgacacacaaaacgttttgcttgtataaagcatgccatagcgcctagaaattgtttccccggatttctcatgctaacgtctaacctcatcgttatcgtcgtgtcacgatgacgggtaaagaacaactcaaagtgagccgatgagtgtgacacaatccactaaaaatgatttgcttgccaggctatgtcttcgtataagtttttctaaaatcaaataatatcatatttaagtttacaatgattaataatacttaattaattaccacgttatgttttacgggcggctaaaaatctcagataaccaaacggtttcgaacgaagcccgattgtagatgacgtatcgacgcccgagccgttacggccgcaggccacgcagtacatgcgtacgtccgacacttgtaggtttaggtgacaggaggcccttgggcacgcgcgtcgccttcctctgtacgtagcctacgccaaccacggtccgagtaaaaccacgacacggcgccacaccgtcgcacgcagccattancggctancggncnnnnggcgcgagcgatgagaaacatctcgtcctcccggctggcctcctctccctccctccacgttctcgtcaaagcagcttttctgttccaatgaaccgatgaactatctggtcgcttcgacgttnggctttcanttcaggcacaaaagtttctttcccgggtggggtccacaagtcggacacgttgaggcctccacgtgggccatgtttgacgggggagtccctccctcaaagncactgacatcgaggccccacgtgtcagtgacccagttctttcgaggcgtcacgcaaccgtcactgccccatgacagactgaaatgtggggcccacgggtcagtggaaccgcctcctccccaacgcgtccacgggacggtacaccgcggctcggtgtataaagtcgggaaccgcatctactcgctcgcagtctcgcccaccgccaccgccactgcactccggtcgccggagcagccgc

SEQ ID NO: 695 - DNA, 2199 bp, Oryza sativa
  misc_feature (382)..(382): n = any nucleotide
  misc_feature (440)..(440): n = any nucleotide
  misc_feature (496)..(497): n = any nucleotide
  misc_feature (507)..(507): n = any nucleotide
  misc_feature (510)..(510): n = any nucleotide
  misc_feature (513)..(513): n = any nucleotide
  misc_feature (515)..(515): n = any nucleotide
  misc_feature (517)..(517): n = any nucleotide
  misc_feature (519)..(519): n = any nucleotide
  misc_feature (525)..(527): n = any nucleotide
  misc_feature (543)..(544): n = any nucleotide
  misc_feature (573)..(573): n = any nucleotide
  misc_feature (1595)..(1595): w = adenine or thymine
  misc_feature (1596)..(1596): n = any nucleotide
atccaaaacgtgatgatgaccatcgatctctatcttgaaaataaatatgcgctgaccattcgccgggagaaaaacttggacgagtatttttgtaaaaaaaagattgtggcaattatatatatagccaatttcaggaaatttttagtttaatttgtttccagtataatattcctcccgtagtaaatatttcatgtctagaaaataattgtcaaacttttgatactttagctagcaataacttctcaaatgttaagttttagaaagagcgtatgtagatttggttttaaaaatgttatcataataaatatatcatattttataaatttattttaatatataatttatggttaatgttccaaaagtttaaccagttcttattctnaatgttaaatacttaattatggccagagatagtagctagtcgtaggtgcgtgatgccngttttggttggagaatcgaaagcacaaaacataataatgtggaaaactgtggaggnnaaattatganagnatnangnanaaaaannncttttgagacaaatanntaaattgatctttgatttactgttttatnttttttaaaaaaagaattcagatgtttggcatgtttgcaatagaacagcatatatatctgcatttgtcaattgaatctaagtaactcgacccacaatacctttgttgaaattattctaaacaattttgtagcatatagtacaatgttatctgtcattaatccaagaaaacaaaatcaaaattcagaacactcgttgaagaaataaattctgctaaacaaactagaaatagggaaaattttctttgttttctccttgcacaaattatgtattcctttaaaatcttagggacatatttttttaattacttgcaacatagtttatacaattgtttcaaatttattctaaactttttggaacgagtttggtggttgcgaacacctcatgttatgtgttgctaggaccacataagctgctctcatgggagcatggacatgtaagttcactattagcaataggatgaacgtaccatgtatgaaaatagccatgaatatgtttaattgcagcaataacctagccacatgcgccaacggatcagtggcgagctaaaaatcgtagtagcatagtctcgtagagaaaaatatatatagcatggttatagtcatgcggtttcaacttcactatgatactcaggtgcctccatttgtaacattgatatatacgaagaaagatctctcttgtttttttttgaaaaatatgtgtgtaaaatcatggtaacaaacaaatgcacacatattgatacaaaagagaggcgcgcaaacatgttttgataggaccactatatataaagtggttctttacacgtgtgacgataagacgtgagtttcacataataacataacctcactctattccgttgttgcataaaagtaaagattacgtaagagtatcccttgctaacagagaaaaagatcatgtcatatccgttcccaatatcatacttttatgctaaaggcgaacaccgagcgcccacatcacaacacttttcgtgaaagaaaacttatatgttattaattaaaaaatwnaaaagcgtaaactattttcaagaaaagcatttactagtattgcacgaaaaaacacctttcaactaaacattccttaaaaccagagtggttctccataaagaaaacttccccaaacaaacaaagccgtcgtattgtcatccgccgctcgctgactcattcgtcacgaaatcaagtcccgcaattaatacaaccaaccaccaatacgtttctcgtaataatacaacacccccaacagagcacttcttatcccaaaaattcacctttctccttcaatcatcatcacacaccccatcctctaacctcttcctctactcaaacttttcctcctctacgagcctaccttccctcctataaataacccgtcacttcccgtttacacccacgcacaacaccacagcgctcatacccgctgcgcacacaaatccgcctcctcttccgctcgaatttacgattctgcccccctccgctccaccgcgcgaaggcgaagccggtagccatgaagctggaggtgatgccgaagcagagggccatggaggccgagcagagggaggaggccatggagatgagcgggctcgagctgtggaagcacgagaagcccgcgtc

SEQ ID NO: 696 - DNA, 2199 bp, Oryza sativa
  misc_feature (1714)..(1714): n = any nucleotide
gatcggctgcttgttgttgggtgagatttttttggtgtgggaaaatcaggtgcgtgtggttgtggttgtggttgttgatgctttcggcggctcggctttgttatgtagaaaaaaaaatcagcggttgcgatttagatactttcggctctgttatggtgttgatacgtggttgttgatcgattttggagtttggcgtggtaggattgattttagtagggtggatttggttaggactttgtagtttgtactatcatgatgtggcgagtcctcatcgattctgcatcagccaaagtacatatggttggaaatttataataattatccaacatttctgaagacgaaaatcaagtaggtggattcagtcataatttaataatgaatagtgagaatatagattaacatttttttatttttcatatattttttctagacattaggctgtatattattgcctgccggtttaccaattactgttctgtatgatatatgagggaggaggaatatgtggtagatttgattaacttgtaatatggggaaatagaagagccttacaatttacatttgtaatgtgcataggagagcctttttagtgtgaaatctagatggatgatttataatgtgcataggagagcctttttagtgtgaaatctagatggatgatttatgcttccgttctagttggttggtggtggtgcagattttattttttgctttactatagagaaaatttatgccatcaaatatattcattggttttgtctgaagtgttgatttagtggatgagcattagtacccactcctggatttttttttgggtgattgattttatcgttaggagaaatctttaaaagtctaagtacaaacagttcaaaccagactggttgaatcctgatgttagtctagcattaggggaaaaaagattcttagtaatgtaggaaatctttagtctgtctccaatttgcatatctaggatgctagttattctttgaaacaaatgtagctgatttagagatgtggtcgctttgtccggaaagataaggtgcaaatgcttttgccaaaagatctagaaatgccatatgcaattatccatggcatctatttcatgaacatatcttcatccagttaaaagatgagatttgcacctgcattcatgaaattctgctgctcttcaaagctcataccacttggcttcacattatttatactccgatgcatctccattattccttgttatgtataaaatctgcttccatgatatttttttggcaatgatgtctgcttcgtttataaatttttgtactacaaatgttggcaaaaaaatctgtagacctgtagcataggaaggaacaatatgatataagatgtggttatcagtccccatttaatctttcggtttgttattcatgcgttcacaataaaaccttttggtgttttgaataccgctcttccatcctcccatttaatctttctggaaattaaatacttataaaaaattatgtaaggtaagtgctgcaatattgtattagacttacatgttactgacaaatgatattgtacatttagaacaaggtagaaatgagcatttatttttgtgtctatctgcctcctacatgtttttactgcctgtcgtgctaaatgttaagaaaaatatatctttagggaaaaataagggagaagacattaaattagttttgtttctgacttttcttgaaancacaataacttttttaactcctagtgttgggaactaattagtgaacagggtgcataatggcatatttagttgccacaccatctggattttatcaaatatacatgtcaaatacatacatggagatcgttacatgtgataggcaccattggcttttcaaacaaacttattgacaaagttctgtattcatgtacttctatgttgttctagcacattttgttgtatatcattgtgcctattcaaactccagtatttttgcttcatgctccttacgccagtgaataattgactaaatgttgtggtatttgaattgtaacaatcagcagcgcagcatgttccacgagctaatgcatcatttcattacaatcttcaatgttgtgctacacttaattaacgatgttcggtttgtgattaccaggttaaggacaggcatactggactgactgttttatggctagacaccatggaaaccattccctactgccaga

SEQ ID NO: 697 - DNA, 2199 bp, Oryza sativa
  misc_feature (577)..(586): n = any nucleotide
  misc_feature (634)..(714): n = any nucleotide
gtggccgtccctctggccgagcgagacggactagtagggtccactggagagtggagcctgaggatggcagcggcgagggtgggggcgccgctccttctccatgcacgtcgcgctgcaggcgcgtcccctgtgggcgctgctccagctctcgaagatggagcaatctggggcgtcattgcagccggcgtgtcgctccacaccgactatctgccatgtgtctcccacctcaccttcgctgccagcttcgtcgacccccgcccccaccacgacgccgagtccgagatgtttggcacggtctccacggatgtccgctccacgagcggcgacggcctcgtcctcgtccgtttctacgactcccgcaaccgcctccccaccgtcaggagctgcggcggcgagccgatgcgcgagtggtcgatgaggaggcagtcgcacgaacgggaccgtgccagcacctggtcggcctccgccttcgtcgtcagccgccactacctcaaccactggccgctcaggcaagctttgcctcaaccgcccgtcgcccaggcgagcttcgcctcagtcgcccgccgcccgggagagnnnnnnnnnngccgcccgctgcccgggcgagcttcgccttagccgcccaccgcccggnnnnnnnnnnnnnnnnnnnnnnnnnnnnnnnnnnnnnnnnnnnnnnnnnnnnnnnnnnnnnnnnnnnnnnnnnnnnnnnnngagagagcgcgaccggggagagagagaggtatgacaggtgggccaaagggaggtattttaatttttatttgatgactggattgccacgtaggcgccacatgtgcaaactcaagtcaaaaccgctcaaaacagtgttgagggggtaattcgtccggtattaaaagtttggggttgagtaatatctggttttcgggttcagggggtaatcggtcgaccgcgataatccaaggggtaattcatactttttctttcttttcatataataaaagttcttaaacaacaagggtctcccctactgtgctccttttaaaaaaatccatagtattcattgttatataaagaaaaactctcaaattgcattaaaataataaaattgtgggtagtaaatttggtctaaccgatgggcgattttaaattcttgtataaaaatattgttaaatatgtgatccgaatttaggcctgtaatatatttggattagtttcctagtgggactccatattgtttcctattaggtatttttcttttatctcctatatatactcttgtaagccgggtgacgttcccattgttatttctctacgtttgtaatcaattcctcaatagtaatcattgccggtcgacgcatgtggttttttcttgcaaggattttccacgtaaaatttgtgtctccgttgtatatctattttcataacaaatatgttttgtcacttaggatgataaattccttggagtacattaagtcacatgagtgttttatgaaaaatatgattctgtgaaatgattactaaatgaatctcgagctgaatctagtttcattttcctctcttatttccaccaagatgattttctttttcttttcaaaaaaaagggaaagactggtaaaaatgaatgttttagctgccttccaagcaagcaaatacagaggggacaatgaacagcatcggatgcagttgtggaaatcttctattccgtcttgttagtgacagcatagagccgcatgggcatggcagcacaaggacgttgctagtgacagtctaatgtaggcaagtacgtacgttaatgggtgccagagtagttttcgacatgcgtgcaatagtgttcaacggtcgcagcttgactcacttatgatacctctctctcgcggtctcgccccggtacttaccactgcaacaaattcgttgctatcttcagtagggtttggttgtaacgatgggatggaatgaatatatttttagaggtgtttgatttaggggtgagtgagatgggttagtccctggagagaaatattcctcttaaatcggggaccaatccatccggtaaaatctcgcggacgagctcgtcccacctgggacgagcgcacggcgtgaggcacgtagcttcaccccgctcgctcgctcgcatcgtccccattcacatcgtcgcacgccgctcgctcgcccctctcgttgcccactggtcgttctcctctgcccaccgtgagtgac

SEQ ID NO: 698 - DNA, 2198 bp, Oryza sativa
  misc_feature (30)..(30): n = any nucleotide
  misc_feature (1582)..(1582): n = any nucleotide
  misc_feature (1828)..(1829): n = any nucleotide
  misc_feature (1957)..(1957): n = any nucleotide
tgatcaagtcctcagtatagttatgttttngattttccgatatttatgatcctgttaccatttcgagccttactgtttttatttagttttcgagaaaaaaatatggttacttgagacgtttttcgaccattttcatccctaatcgtgcatatttgttcagaacataaaaggatccaatcatttaatttacaaactataaacgcacaaatataaacaaatatattgactatgtttgacaaatgttttttaagtatgatttaaaactttttatatttgaacaaattttttaaataagacgaataaaagtttgtcaaaaagtcaatagctttatacgttaaaaaacgtaggtattacgtaggaacttgggaaggtgtaaggggaactgaccacgcgcggtcatatatcagcatcccctcgatctatgaaaacatagatcgcaccggctttggcatataaatactacggacggagctcctctgacgtaaagtcagagagacttcataatgtccctctgacttaaagtcagaggagcctcgtccaagtactaccactagcatgttccatcgatggcgagagagattagtagagggggcactcaactttgccaaatcgcccatgggcgaagtggccaccaccaccctgctgctgacgagccatgaagcaaaaccggccaaggcaccgtctatccacgacgccatcgaggtgtacatcggcgccaccggcgcccgccaacttctcaaggccatgctgctggccttcgcttgggctttcgacgcgcagcaggtgttcatgtccgtgttcacggacgcggagccgccatggcactgcaccggcgtcgtcgatgcggttgaggcggcggcgggcgactccggctcgtcctgctcttcgccggccacttcggcttcgccgtgcgcgctcccgctcggcacgtgggagtgggaccgcctggccaagacgtcggtggtgtcggactgggcgctcaactgcagcggcggcggcccagcgctcgtctccctcccggcgtcgtcgttcttcacaggaaacctcgtcgtcgttcttccatacagtctcatatgtgcaccaatgtgtgaccgcgggtgtgagtcccgtatgtgctcgtgtgtggggccggtcagtgctgaggagcaccaatgtgctctagtgcttgtgcacactcagcactcaggatggtgtaagcccaaatcccagtggaccgcgggtgtgaggtccgtatgtgcccatatgtgtgtgcacaagccgcgggtgtgagtcccgtatgtgtccgtgtgtggggcctgttagtgctgaggggcaccaatgtgtgaccgggggagattgctgggaatagtcccacattgctaatttagggggagttgaaccaatttaaaagtagagggagtccctcacctcttgagctagcttttaaggtgtagcaagactttctcccggttagaccaacgtcgggggaatctaatgggcgggtgatcgatcaacccgcccctccccctatactcctctctattctttcctttcatcataaaattcaaaaaaaaaacaaagttagtaaaaaaataaaaaaatntaatactctcattcatgtgcatagactttatactgtaaactttacacgcataaactttatgtatagaaatattttatatacaaaatatttgaatccgaatttgaatttgaatcgggcatataaacttttgacttataaacattcgctctataaactttaggtggataaactttagatgtataaaatttaggtgtataaacttactaaaaagaggaaattataaaatatttggattcgaatttgaanntcgaatttgaatcgggtatataaacttttgacttataaacattctctttacaaactttaggtggataaattttagatgtgtaaactttaggtgtataaacttattaaaagagaaaaagaaaaaaaaangaaaaaatacgatcgatcgcccgttggccttctcgaccaacgtctcctggtttcggctcaacagcatctgctcggcctggctccgagacgtctgcaggcatccaaacaagcttgcaagttgcatccggagatgcgagccaggctgatacagccaaccaaacacgcccttaattttccccgatactaccactggcatcgtgagagatcagtagaggtgagcactcaacttcgccaaatcgcc

SEQ ID NO: 699 - DNA, 2199 bp, Oryza sativa
  misc_feature (786)..(786): n = any nucleotide
  misc_feature (800)..(800): n = any nucleotide
  misc_feature (834)..(834): n = any nucleotide
  misc_feature (838)..(838): y = cytosine or thymine
  misc_feature (840)..(840): m = adenine or cytosine
  misc_feature (841)..(841): r = adenine or guanine
  misc_feature (844)..(844): r = adenine or guanine
  misc_feature (846)..(846): s = guanine or cytosine
  misc_feature (847)..(847): y = cytosine or thymine
  misc_feature (851)..(851): y = cytosine or thymine
  misc_feature (855)..(855): y = cytosine or thymine
  misc_feature (859)..(859): y = cytosine or thymine
  misc_feature (1620)..(1620): y = cytosine or thymine
  misc_feature (1621)..(1621): n = any nucleotide
  misc_feature (1623)..(1623): y = cytosine or thymine
  misc_feature (1624)..(1624): n = any nucleotide
  misc_feature (1666)..(1666): n = any nucleotide
ttttttttgtaacacccatgaaattgcatggttgcaggattgaacgattggaattgtttgatgagttcgaagagtggcatatgatgcaggtaagttcatgagaatttccacttattggtgagggatcccgtacaaaactagcagcttgtgtatcaactccacttcttcattacattgtctcttttctcaggaacactattgtgtggcttatggaataaatgatgccaaggttagcatgctattatatcagcgaccaaacgttctctacagaataccttcgttacgctctgtccatgattccaagtgtacacaaaatgaccattagttgtctcttccactttcagggcctgtttgatgattttgggtttaaggactagcactcgtcgtgctctttttgatatcgaactgagacaaattcaactgggaattcctactgtttcctatgcagagaaacgtacttgaagtgtgtgaaatgtttggcagaatatgagagatgatggctataacaacattgtacatattctgtttgcagatacttggttgtatcgattgtcatgttgttatgtatgttgcttttctgccttagctgaatggtttttctgacgtttccaaacccttcgtatgggctcgtcatgcaattgtatggtctggagaagtattgtcttaccgttcaggcgttttatctgtctttggttttatctctgcttgttcaataatacagcttatccgagtatgtttctcgttgatgaaccaaagatcatctacaaatcaggaaacggagtaaanatgaaatggaaccnaaccaggattaagcgaacaaggcagagattactnattycmraargsytttyaaayttcyctttttgcaaactttatagctacaaagtatctgaaatttgtaaaccctcgtagctcaatgggttttacttttcttgatgaaaaatggagcattgcatttttagtgttttttgtgcggttgcaggataatgtgtgactaaggtgttttcaactgaaattgctgaagtttcttctcaaacagaaactttgcttgcaacctgagatacttcagcaaaacacgtggaatattgcgacattcatgcgaaactttgcccttaattctgttttgcaaatgcctagctgaattgctgtgtctcaaatgataacagaatcacttgaaatgtagtactctttcaattggtccggctcaaaattgacatgaaaattggctcaatttatgctgaaaattcatcgattcagtgggatattttcatattagaccctggccttccttattattttgggaaaattggaactattatttttgtcttagtcctcccgccgccgcctcctcctcaagctctcaacacggcggcggccggccggcgatcccccgccgcgagaggccaccgggattcgagatactcctcccagctcgaatacgcgcatcccgcacaccattccacccccgcatttgacgctgggagccaacccatggccccatcacccggctcccatgggcggcggcagtggcggcctcgcggaggcggccgtcgggcgcgcggcggcgctagcccctcgggcaagtgctccgcggcggaccagcccaaccctcttaccacyncyncgccgtctccgatgcaaacagcggtggcgagcacctcctacntggtaacctctccactattttctgctccattgctaatgcaaatcgttgcacagatgcggcaaatgtttaagttacttcctgcttttattccccagtgatgagtgataactaatttctcgtattgactcatgagagatgaccattgaccaaataaaccttcgctattggttgatttgttaatttagcggggtcattagggtgtagtcaaatcaagccagaagatcattataagtttataacattttttttatctgagataagagatatggccgtgtataaatgtagattaattgctctggtctttggtcttgttgcaagaacattatcttgataaaactatgtctctattaaatgcaactccaggttaaatttgagtcaatactaagagtagttttcataataatgaaagctggcatttgttgatcatcttatcctgcagggtgctgatgcgagccaggtggctcatatagtctgtgtttctcatataaatccccattagcttcaaggttaccacttaccaacaccgtgatcat

SEQ ID NO: 700 - DNA, 2155 bp, Oryza sativa; identical to SEQ ID NO: 647
  misc_feature (129)..(129): n = any nucleotide
  misc_feature (326)..(327): n = any nucleotide
  misc_feature (1414)..(1414): n = any nucleotide
  misc_feature (1443)..(1446): n = any nucleotide
  misc_feature (1448)..(1448): n = any nucleotide
  misc_feature (1450)..(1450): n = any nucleotide
  misc_feature (1454)..(1455): n = any nucleotide
  misc_feature (1458)..(1459): n = any nucleotide
  misc_feature (1461)..(1463): n = any nucleotide
  misc_feature (1635)..(1635): n = any nucleotide
  misc_feature (2066)..(2073): n = any nucleotide
  misc_feature (2075)..(2075): n = any nucleotide
  misc_feature (2083)..(2088): n = any nucleotide
  misc_feature (2102)..(2102): n = any nucleotide
  misc_feature (2108)..(2108): n = any nucleotide
  misc_feature (2120)..(2120): n = any nucleotide
  misc_feature (2124)..(2155): n = any nucleotide

SEQ ID NO: 701 - DNA, 1999 bp, Oryza sativa
  misc_feature (5)..(5): n = any nucleotide
  misc_feature (24)..(24): n = any nucleotide
  misc_feature (127)..(127): n = any nucleotide
tcatncagtgatggagatagcatncgtcgtaaagttcggatgactagtagtgatcgattttttttttctttacgtatcaacggctaacgataatgaagacgacagtgacggagcccgggcagccatnccgatctgcccaggagctgtgttcgtcactgctagaactatataagtggagcaaatgaagtggattacttttccatctattacaataaagattatttttatcttagtgattaataatactaagtaggaaataaatcacaaacgggcttgtatttgggtagtgaattatcccgttacctcccatctggcaaaaccggcctgtggtcgtcgtttatgtgaaggggttggtcgcaccaacgaacccaaacagcttagcttgtcctatatatgccgaccctgtccccgtggtgtgatgtactatatataagcccatgtttagcattgctgacgtagcacaagttgatagacagaaaagaacatgggacaaactccaacagagtttcctcgtccactaatctaacctacgtcactaatttaatccactctagtaaacgaaggcactctaggagtaatacaatctactctagcggaataggagtactcccctgtagagcacgcagccttgggtaaactcgtgagggcaggtacaatagcaagctataagccagctgtaaatatattttaaggggttctttgaatcaaaggatttatgtaggaatttcataggattcaaatcctatgggaaattttcatatttggccctttgattcaaaggattgaagctttccaaatcctatgaaattcctatggaatggcacattgcatgtggattttggaggaaatttagcaagagctctaacctcttggaaaatttcctttgagtctatctctctcatccgattagagattcctgcgttttcttacgctccaatcaaacgaccattcctatgtttttcctgtgttttgcaattctttgttttacacttcaattcctgtcagaatcctgtgtttttcctattccttcgttttttctactctgcaattcaaagaggccctaagagataaatgaagagagagaagagcagcgagctacagatttatagccagttgtagcacggactctaagacacagtgtgtgtatgacaggtgagaccaggtattaatagcatagtatataactattatgaatgagctattagattagttatagatgaattagagctagtagttggctatactattaaacttgctctgatacctctacccgtactagtaggtcaataattaaactattcctacatcaattaattacagtaatttgggttgggacttgggaattactcctgcaatatactccctcgtccacaaaagttatacatatttcacatttaagtttttccaaataagttgtttctatttatagtctttatacatttaagatttaaatgaaaagataaattaaatgttttattagaactcaaggagtcatctaaatactcattggttgtatgcttgcatttactccttgattttgtaacattcaatgtgatttaattttttcttggtcttggtgacaaaagtaatatggataattttgtggatggagagagtactgtacagtcggacacagcggtgaccacatggtgggtaatcttgggaaaaggtggtcgttccagatcctacctgacacatcccgatgcgttgccagctcatcccgtgggccccacccagccgcctagcccattttgcgctttaccccctctacttccttcccaatctcaaccccaccctccttataccgagaagactttttcttcgcaaccgggagggaccctctggtttgctgtttttataaggcggactcctcaactccactcccacttgcagttgcaccgcatctcatctcatttattaccaacccactcctctctctctctctctctctcatctctcgtcgttttctctctcctcgatcgagggcacgcgacgcgcc

SEQ ID NO: 702 - DNA, 1999 bp, Oryza sativa
  misc_feature (280)..(280): n = any nucleotide
  misc_feature (727)..(727): n = any nucleotide
  misc_feature (729)..(729): n = any nucleotide
  misc_feature (735)..(735): n = any nucleotide
gaggaagagactgcagtggtggtgtcgtcgtcgcctcgtcggtgtggtggttgttccgtcgtcggcggcggtggtggcgacggtgaaacggcgagacgcggtgggacggcgccttgagatggcggggaccgagcaggccggcggaggtgcgagatggtggcggcggccggcggcgaaacgacgaagagcaagggcggcgcgagatggtgggagcgaggacggcgggggccagccggccaggcgaccagcagtgggcggtggggcgccggcgccacgggcngtgggcgtgagggcacgccggcgccgcgatgccgcgatctggatgccgcagccgccgctccgcctccaactcgcgagtcgcgtctgagttctgagtctgacggtctctctctatagggttagccggttagggtagatgccgccgcgatttgggttgggctgggaagctagggatgaattatggactattgaatctatggtatttttaacttcggaaattccgacaatttttccggaatgtttccgatcgtttccgggttccgacggaaactgctattatcatattcgattccgtttccgagaaaatatttccgttttcgattccgattccgagaaattccgaaaaaattccgaccggccgattccgtttccgaaaacatgaccggaatccggaaaaattccgtactgttttcacccctacatgtcatacacaacaaaagggttctcntntactcntttgttgagatagagtacagatagagtatatcgctgactgcacaaataagatcacttgttaagccattaaagtgttgcttccgttcacaaatagatgctgttttggatgtataggaggcaatgaaatcttgattatttttttaatcacttatagatgcaaaaatataatatgatttaatattcaaagatggcactcattgatttatcataaaaaaaagactataactgtagttatattgaactgtttattatgaatatatgattatcaataggaatgataaaaattaatgaattggcgagagagactatgtcgtgattgtacaaataaaaaggaacacaaggagtatagtatattttgcaaaaactaaggtcattcatatggtcaaaccaacaattccaaataaatatagattttgaaggacattaaactcacaccccatgctaacaaccctctagcttgtttctttttcctttgtcacgaaataaaaaacctcttccttccacctcacataatacctatattttaacctcacgtattttttactttattacaagtcgacaaagttatagcacaaaatattcctaacatttaatttgtatcattaatttttaaacaaagtgattatgcgtgcgtacttctcctggccatatataatgccgtgccttgttaatataaccctgttatccaacgtgcgcgtaaagctatctatatatatgatatttgtgtttcagaaaactccaatacttatatgcttcatcaggcacgttaatttcttaattttctgaaatctagtgatgcagctttcgttactgcagcttccagagcattctttttaaagtatttgttcagaactattctttttattgttccacaatttggatcactatacaagccatggaaataaagatgaactgattttgttaccttgcatgcaaaactatatatgtctgttgacattatgtgcatttctttaattttcttccacggaaggttcaaattaataaagagtgtggtgcatatcaatccacttttaccaactttagtccatatgatgcccacattaggcgtggatcacaattaatattttatatgtatacaaaaccacaagttaatctattagctcatgaacagctaaaacttttatgtcccttcttaaatcactttagtctttatagctatatataaaaccaccaatagatgaagaccttaaacctatccctctcatacaaattcagactaaagattttctgcaaacaaaaagcc

SEQ ID NO: 703 - DNA, 1935 bp, Oryza sativa
  misc_feature (3)..(6): n = any nucleotide
  misc_feature (139)..(200): n = any nucleotide
ccnnnntaaaaccccttttccccccccccctccatctccccttgcgccgcgagatccgtatcacgaacgtgctagatctgcttgtagtgaacggtctggacagagattcgtcgcgtcgtcagcggaaggaggtgcttgnnnnnnnnnnnnnnnnnnnnnnnnnnnnnnnnnnnnnnnnnnnnnnnnnnnnnnnnnnnnnnaatttcagtggattttgctcaactcggttggattggcacgagattggttccgcgtgtgaccgtttgttggagaacatgaaatcgcgttgctcgttctggtttggatgctctgttttctgaactaggttgctcgaattgaatctgattggtttatgtctacctccgagtatcaagtaagttcagatgagcggttagctcgttttcagagctagacgggatcacgatctgggaatacaatttttatgaggcaaatgcagcaaatataaagtgatctaactaatgccacttgatattatgatgaacatgttgttgtgaaactggaaaatgcatgccaaattgccaaccatatacatctcattagtagagtaacttcgtgacagtgaaagaaaacttcattctagctgaggggagatcacattgaaggtattcgtgatataatatgttagcaagataagtagctaggatggtttattcatagcacattggtacctggcagcatgtcagatagatattttctatttcagcaatatattgatcttaccttgtgcaacagttttctccatccaagttcagtgaaaatcatttgtccttgaacttatctactcaagcgatgaacaatactcatacacatgagcatatgaatcagttctatcttctatgaagccttaaccctagatttatcacaatctagtcatctagaccggcagaccacattgaactcaattgcaatttgtgagttgttgtatggcttcggaatggggtcgaatctttcttcaatccaggatggaaattttgagatctatacatcacgtttggtacatctctactactctagtactaaaaacatgaagattctgaacatggacattgcatagttctccatcccaattcaccctgcagtgatcgctgcactggataattataatatcagttaaaattgaaaataatgcaacttcatacttgcatggtgtcagtagtgcctgcctaagaaatgtgtcttgtcataatatgattacatgaaatatgtttacttcctcgtttctctttatttgtaagataaagaactagatatgtggaaagtaggatagcaaagagtatggccaaactctaatctttgctttattttttgggatggacccaaaatttgtttctcctttacttctttccctttacaacaatgttctttacttccaattcttattaacaaaactccaaatacatgccaaactgcatatgtatgtatgctattaaggcacatttacaaagctccaagtttacctactcaatcattcacatatggcgatgactcaaactcttaattgttatctgtgtaagctgtgacttgtgtaacacattctacaagtcccatacgaattctgttcacaaaagtttctttgtccagctcataatttacaaaactgcaaaatgccaaagcaatctggcacaaccttatcatcatattttctttccacgcattaaagcactggcagaattatctttgtgtagatattccaaaagtattggttgaataaatgtccaaataaattccatgcctcatgatttccagcttatgtggcctccactaggtggttttgcaaaggccaaactctttcctggcttacacagctaccagcatgtataaataggcccctaggcaaccattattccatcatcctcaacaatattgtctacaccatctggaatcttgtttaacactagtattgtagaatcagca

SEQ ID NO: 704 - DNA, 1999 bp, Oryza sativa
  misc_feature (370)..(370): r = adenine or guanine
  misc_feature (593)..(593): w = adenine or thymine
  misc_feature (731)..(731): n = any nucleotide
  misc_feature (1078)..(1078): n = any nucleotide
  misc_feature (1131)..(1131): n = any nucleotide
  misc_feature (1156)..(1158): n = any nucleotide
  misc_feature (1233)..(1235): n = any nucleotide
  misc_feature (1238)..(1238): n = any nucleotide
  misc_feature (1369)..(1369): n = any nucleotide
  misc_feature (1373)..(1373): n = any nucleotide
  misc_feature (1601)..(1601): n = any nucleotide
  misc_feature (1637)..(1637): n = any nucleotide
  misc_feature (1647)..(1647): n = any nucleotide
  misc_feature (1667)..(1667): n = any nucleotide
  misc_feature (1786)..(1786): n = any nucleotide
ttaaataccatgcctctataaggatatatcctagtacgttgtcgtgactaattaccatcatcggtactctacaattttactgtgtgcttacattcgatccgaagctactttgtttttaagatagaaatggagcgtataaaggatgtccgtccttttattccaataagaacaaacacaaagcacatatggaaaatactaaatccactacaacaaaatcatagaccatacaaagcaggtaaagatgtagcaatccacattgattcttcatccactactacaacaagcgcatatgaaaggccgcatatgcatgatcattgtgaatatgacatgcccttgtcgagcaaacgtgtcacttcatgcaaatatgttrtttcaagcgacatcaatatatggttacaaaattttaaacattggtatattaatgactttcatatatgcatattaatttcaattgaaagacatcttgttgtccatcattcctaacaagaggtagtgtacaaggcattatttagttgagctctcgctcactttgcatcacagaagcataacctagacataggtaattcattatagaatcaaaaactgcagcagcwacaatgagggtaaaaactagaaagaaggatttattatgttccttagtttattcagccacgaaagagtgacttaaaaaaaatgtacacttcttccaaagtgaaaattatgggatgtcttacttatggaatgctcctacncactgaggttgttcttgctgacccctcgtttctatgagaagtttattataacataccaagtcgatagtttactgcaaacaaaatggataataaacctgatgtttcaacaaaactacaggaactcacgcatgatgtacccaaaggtaactggttcttgacacactacaaatctgtggtagtccttttccatctcgaagacgaatcaacgctgtgtttagaatcagctgttcccaacatgcgaattgcgcacagaaaacggagcgctccattagagcgtgattaattaagtattagcttttttttttcaaaaatgggtccatatgattttttgaagcaacttttgtatngaaaccttttgcaaaaaacacaccgtatagcagtttgagaagcttgcgcgcgnaatacgatggagatgggttgggaannntggattccaaacacagcccaagtctatccaaaatgtttagacaagaaaatacgtaacaagttggtttacagaaannnganttagatcaatcctgcactacaagtagagtaaagtggtgatttctcttaaatctctcgaatggtgatttaagaattcagtgcaaacctaatccttgctataatcaaatgttcggtaccgcatcaacggaacnatanaaagcgcctggcgtaccataattttgtcattcttgttgaaatttgtaatttaagatgcatgaggccacacgaccttaatgttcaacgtgtcatgcattagtgaaataatagctcacaaaacgcaacaaatatagctagataacggttgcaatccttaccaaactaacgtataaagtgagcgatgagtcatatcattatctcccgcctgctaaccatcgtgtacaccanccgatcccaaaaatgacaacttctagggatgaaccnggacaaggtntagggtttagggatgaatcnggacaaatgattgttcaggttcatccctagatgttggtttctccttacgggacggagggagtatatgtgatggacacaaaagttactttcatgatgaaaccaaaggggatttgttgggncacctaatagaacatctgtccaaatggcatgactcacttatatcctaataggacatccaagaaaaactaacactctaaagcaaccgatgaggaattgaaagaaaatacgtgccaccgcatctataaatggacaagcgcaatggaaaccctcctcatcgttcacacagttcaagcattatacagcaaaatagaaagatctagtgtcccgcagca

SEQ ID NO: 705 - DNA, 2000 bp, Oryza sativa
  misc_feature (1420)..(1420): y = cytosine or thymine
  misc_feature (1465)..(1465): y = cytosine or thymine
  misc_feature (1466)..(1466): n = any nucleotide
tccgttatattgagcggcgttcctggttttgtaggacccctgatttcgttttctcatcgtgcttttcgtcccgtaatcattcacgcgcatgaatagcagggagacagcaacgtttcccactcgcaacatcgcaaaccatactgtatcttcactcaattattctgcaactgaaaccattattaaacgagaaaattttgattaaacatactaatgcgtctgattctgaacgcaacgatttgactccaaacttcgtccttgttgccggccggtggtgcagtagtgtgagccgcatcaagcgtaggcgactttcacgttagttgcatatacaaacgaccacttgtctcagagtttttgtagtcggctgcacatggaaatgatagcgctatacccttacacccagttgcctaagtaaaataaaaacttgggtgaaaactcgcaatcacaaatctcgtagtacaattgtacaaatcagcaggatgagggacgtacaattaacctgtctgcctcaccgaggcctgcaccactcaaacgcgcacgggaagcacaagcaggagcagagcacgatgtggtgtgtactggtgtgtgcctccatcaacggctcaacgctgggcaaagagagagaaaggaaagatatactactgctgccacgacatgtaacatgtgactgttcacggtcattttcatcccaaagactatgcgattgtgcgatggtaacgtgcgattgtgcgaacgattaaaaaaaaaaacttatctcaaccccatgaggccatggccctgtgttagcttttaattcagttggttattttttttcagaggggttaggggcttctcctaccactcgatatcaaaaactataaaaaaatattagtgtgtgtttatcggtagatgctggatatgtataatgtataccattttcattattaaaaaaaactctcttacaacttcgtgtccaatcacccaacaactcataactccgtagtgatcattgtgacaattttgaaagaaagaaaagaaaaaaaataaataggttattgaccaaattattatagtgaattatctacattatatatatatattaaatgtatcgataaatgtattaacttatgattgattaagttttaattattataaacttgaaaaatagattaatatgatattttagaataactttcgtataaaaagttttcgcacgaaacacaccatttagtagtttgaaaagtgtgccacgaaaatcttaatctccatctaactcttgttggagaaaagaacataacctacagcagcagtagtatttcactcgtcctaaaataaaataaatcttatgtctagtactacctccgttccatcccaatataagtacagtgtaggtttccgtgtttagatagtccgtcttatttaaaaaaaaatattatttttttcytattacatgataaaacataaatgatactttatgtgagactattcyntttaaatttttcataaattatttaaataagacgaatgatgaaacgttgagtgcggaaaaccacgacggcgcgtatattgggacaggatgtagtactactcaggcaccaacaggaggggaaaaaaaaaagaatccatttgctacagaacgtttcgcacgcaggaatgaaccatgaccgtggtgtcggtccaggaggccactgacccacccgccaacggaattgaaaaagcgctagaacaaccaacgtgaacgtacggccgcacccagagccgcgtccgcaaaaacaggcaaagcgcacccagtaaacaaggaaaacccaacagcgacccatccactgatccattccaaagccacgagcccatcgacttatccgcacccatcacccagcctcctctccacgcaaacgcaacccaacccaaacccccctataaaatcccttctcccacacacagaatttcacaagccacccacagacacgtactacgacaccgagtttgagctttgagctttgaggagtgtgtctgagagtttggtc

SEQ ID NO: 706 - DNA, 2000 bp, Oryza sativa
agcaaccttgacttaattggcgataccccgcggggccctcctagctaagccgatgcttccacgatgattccgtgattccgtctaagggagcaacttaggctgagtttagttccaaactttttttttcaaacttttaacttttttatcacattaaaatttttctatatataaactttcaatttttccgtcacatcgtttcaatttcaaccgaacttttaattttaacgtgaactaaacacaccattagcaaaataaagcttccctgttccgaaacatgacggcttctgaccgtcaaacgaatcgtcctagtcttcgactacaagtagatgccttgcccttgaatcccagccacgccagcatcggcatcagcttgtgcaaacttttcaacgatgagatgagcagcacgactgcacaagcatatgagacgagatagtgaggacctttttcctttttttccacgagggaatatgagagagcgagacctcgaagggtcgtacttgcaatttcgcgtttatatgggccgtagtaggctcatacacgtccagcccatctgcgaccagttcggccattcagttacggattaagttcaccagccgtccctcaactttatgtcgacttggtataacatccctaaacctcaaaccagaaatcttcacccttaaataatacaaaaccgtgcaatttcgacctcatggcagtatagacctctggtttcgctgatgtggtatcatagtaagcaaaataaaaaataaaaaaatatgagacccacatgtaagtctcttctttcttctctattcttctctccgatattctcttttcttcttctctactattttcttcagagaagggatagatggatatcggggaaatgagggaggggagaggcgcgggacggcaccatagctagccttgccgcatgtgggttcaccgcggaagggcgcagccgccgccgccgtctccgggtgacgacttggaccatccacaacgaggtgccttccgacgccgtcgccttccttgtcgtgccgtgcgaggtccccttccgtgaagtaagggtacggctagcagagaatgtcggtgcctctgctgccaccatcactgcagtcaggtacagcctcgcgcgacgaggacctgttggtgtcggtctccttcgatgaggagctcgcccacatgcgcgacgagtacgaccgtctcagggcaatgcatccgttcgcgagcttccagctgttcgtctccaccgctgttgcttatacctcctcccgtcgcgaggcgctcgaggtggcggagttcggccgggctcgacggcggcctctcccctctctgccgctgccggcctatcccctctttgctatcgctgaagagaagagaagagaagaagaaaagagaagagaggagaaaagaaagaagagacttatatgtgggttccataatttatttttttaattttgctgactagaataacatgtcagcgaaacccgaaaccagagatctatactgccgtggaatcgaaattgcacggttttatatagtttagggataaagatttctggttttggggtttcgggatgtcatacaaacttgtcgtaaagttgagggatgactgatgaacttgttccttcagttacacgcgcacgcatggtgatacggcccacgagagatcgggcccaatacaggcagcggcggccgaatgcagcagcgcccgtaacctcgtacgtatcgcctcgtgggaagcggccgaggccgcgcgcggcggcaaccacagcaaaccacaggtgtcgctcggcgtccgacacgagtcccgcatgcgccccacgcggcggctccagcacccgcctccacgccgccccatgcacggcgcctccccctataaaccccaccctcttctccctcctcaccgtcgtcagtccacttctcactagctcgtagacagtgctgcacgtgggttagctacttagctctttctctgcattgctggcttaattttgcagctgcaggtgtgctcg

SEQ ID NO: 707 - DNA, 2009 bp, Oryza sativa
gttgtcaactgaaatcatcaccaagtttggttgctggctggttcttgttttattttcgttgctagcaaaatgcatgtacgttgttacagaatttagaaaatcacatcgccacattgcaaaaaaagaaatctattttcagtttagagcctaatttagaattaaattatatgtttttttttcatctttttatatctcagctataaaagatttgaaatggactcaactaaatcattaatgcataacttcctcccttaaaaagtatttggtttcgagagggatggacatgtgagttccacgtgttatagtttgagggagttggtggtggcagaccgaccaacttgaaactcaaacaagatcatcattagttttatgtgtagctgctctgagcctccgttctccatgtctctctttttgcttttgcctagttgcttacttgcttcctatttacaaaatggctttcaccactctttctcaaactaaaagaaagaaatcaactaggaacggttgtactaaggttgaactgtgacatcctggctcaattaggatgaggcatttgtggcccatgagagctatgtgctcatgtttaataccacctcactagtttagcaagaatggaaccaacttataacgacttgttcctccaaacatatcactcccggataatcccttttacatgaagcgatggtgaaagtgtaaatgggtagtatgtataagtaggcccacccgtcagatgggctggctacgttgttctagagggtggactgttacaaactgagctcaaccaccaattataccgttcccaatgtgggaccaccaaagaggtagctagcaaagtacactacctaggcagcaagagatcaccagcggcacaagaacaggcctctagctcatggcttgaatgtgtgagaatcatagattatttatttctaatctataacatgatggctttagtctaaaatgatcaccctaattctaatgcggaattggataatggacggtgttttgttgacagacatggagatgttgttgatgctatgaatagtcgatagttttaagttggttatttaatttggatatagactgacaaatgattatattcttctaattgattaaattctacttttggatggttgataggattatttacaagttattggaagaacttgcagcatgtggggtatatggttatactacgtgacatatattcatgagtggagttcagagttttggcttgtctccaggcatacatatacctaggcacaagtccagcgcaaaagcatacaaggaagatcataacaacatgtttcccttctctggaaaattttgttggcaacagatgccttctccttctttcagcttctgcttctttagtcagtttggaggaagcagcaaatagttgatgatatgagaattccttctacatcggcttaggtgtagcaacacgactttattattattattattattattattattattttacaaaaatataaaatagatcagtccctcaccacaagtagagcaagttggtgagttattgtaaagttctacaaagctaatttaaaagttattgcattaacttatttcatattacaaacaagagtgtcaatggaacaatgaaaaccatatgacatactataattttgtttttattattgaaattatataattcaaagagaataaatccacatagccgtaaagttctacatgtggtgcattaccaaaatatatatagcttacaaaacatgacaagcttagtttgaaaaattgcaatccttatcacattgacacataaagtgagtgatgagtcataatattatttttcttgctacccatcatgtatatatgatagccacaaagttactttgatgatgatatcaaagaacatttttaggtgcacctaacagaatatccaaataatatgactcacttagatcataatagagcatcaagtaaaactaacactctaaagcaaccgatgggaaagcatctataaatagacaagcaca

SEQ ID NO: 708 - DNA, 1999 bp, Oryza sativa
  misc_feature (23)..(23): n = any nucleotide
  misc_feature (1000)..(1000): n = any nucleotide
  misc_feature (1020)..(1020): n = any nucleotide
  misc_feature (1104)..(1104): n = any nucleotide
  misc_feature (1111)..(1111): n = any nucleotide
  misc_feature (1115)..(1115): n = any nucleotide
  misc_feature (1118)..(1118): n = any nucleotide
  misc_feature (1127)..(1127): n = any nucleotide
  misc_feature (1130)..(1130): n = any nucleotide
  misc_feature (1134)..(1134): n = any nucleotide
  misc_feature (1143)..(1143): n = any nucleotide
  misc_feature (1160)..(1160): n = any nucleotide
  misc_feature (1196)..(1196): n = any nucleotide
  misc_feature (1207)..(1207): n = any nucleotide
  misc_feature (1214)..(1214): n = any nucleotide
  misc_feature (1288)..(1288): y = cytosine or thymine
  misc_feature (1314)..(1314): n = any nucleotide
  misc_feature (1972)..(1972): n = any nucleotide
aaacagtggatgatttgatagantcatagaagagggcaatggataaattttaaggtaatattataaagcctattacgtaaatattgtttttgacgtaattcaagtgctaagcagtaacaccttatatatctatataaattattatttagatgttatattaaggggctcctattttgataggaacattaatagctcacttcgacggtagaaaatactcaccatactttgtggagaaaatatgaaggaggagaagaaccgttcatcctcacttcattatcttcttaattaaaagtatatagtgtttgtgtatatgcgctgaattcggaagtagattcagaaatgttttccattggttacacctttagacattgtttacaaattgcttgttcaagaaacaaccgaattttattgtagcacacaaggactagtctgctccctgaacagataattggacttggataggggcttctttcctgatgcatcctaaccctaccgcacactgatttactagctagaggttatctttctgcatgaacagaagtcatcactgcagaaactgaattagttcaatgtgagatgaactggtgaggatcagtctttgtgtatggatgtacataaatggatgtggttcaccgcatttcatgggcttcaacagccttcaattagttgatttgatatatgatagcttttcatttggagagtactattggtgaaatggaagagagacagtggagaaaagataattgttgctacatatgacaacagtgagagtcaacttttagcatttatcaaaggaaattttgatgtatggagtgaagaaaagaaaacaagagtgataaaaaaaattatttcggtgcagtaataattaagaggctttgttgtgtcaactattatagaaagatagtttttaagtgatatttattagatatataagagctttcctacatgccttacattaattctgcaagcttggttagtttctaccctgctcaaataattnaatataattaaattataacnaaattaatacttcgttgtaaaaaggatgatgtactacagtacagtgtgtaggcaaacactcaaactataaatcataaataaacncaaaatnttcnggntttaaatcnccnaatntcaaatccnatataaattaaatgtcncattttgttcatcacaaaatatataaatcaaaaccnttgatttcacnggattgngctcaatttcaagcaagagaaaggacatgaagacaaactcactcgatcacttgtattaatcgattaccttttcytttgttgaaaaagttttttttttttngctttcgtataattatgttcgattcgcttggctttgatacggaaaagaacccatacactaaaatcacacgtttcttaattttgtgcaatctagtgtgttaaagcttcattgctgaacactttttaactgccagagcatattttctaacaatatttgttctgagctcttctttttctttgtcttgcaaattggatcactatacaagccatggaaataaagatcaacagattttgttaccttgcgtaactcgacgtctgttgacagtatacgcattaattttcttgcacggaagaatcaaaacaagttgaaaaaatgtggtgcatacagtccactttaacaaacttttatccatatcatgtccaaatcgattaggtgtgagtcacaataaatgttctatgcaaacaagctaatcacaattatgaacagcaaaaaaaattgtgtccgttcttgagatcactttagtctttatagctatatatagaaaccacccatagatagctatccctctcataaacaaattgatagttaagattttctgcaacaaaaatatggcttccaacaaggtagtgttctcagtgttgcttctcgccgtcgtctccgtgctcgcggcgacggcgaccatggcggagtacccaccacccaagaccaggtggtctanaccccgggcccgctctgtcagccagga

SEQ ID NO: 709 - DNA, 1734 bp, Oryza sativa
  misc_feature (8)..(10): n = any nucleotide
  misc_feature (30)..(30): n = any nucleotide
  misc_feature (181)..(200): n = any nucleotide
  misc_feature (211)..(211): n = any nucleotide
  misc_feature (340)..(340): n = any nucleotide
  misc_feature (342)..(342): n = any nucleotide
  misc_feature (673)..(673): n = any nucleotide
  misc_feature (941)..(941): y = cytosine or thymine
gagcggcnnnggcaggggggcgcagctttnggccgggcagccggcccaggaggagaggagggagaagtggcccgggggagagagggaggaggagggaagggcggcccaagagagagagagggaaggaaaaagagagggagaagagacggactttggccgcgggccgagagagagagagggnnnnnnnnnnnnnnnnnnnncccaaagggangagggggattatttttagcttttctttttagtaaactttgataattgttgttgttgcttaataaataattccgttgctctgaaaattcaagtaaaatttgagggctccttttagaccaaggagaatttnancaaaaattctccggaccacattcgaatttttttgtacgtattttagtgtttgccaatttcttttcgaattttaattaattctattattccttttagaaaatgatttttattttgggatgaatttatcaggacgtgacagctgacccctcgtttctatgagaagtttattctaacataccaagtctatagtttactgcaaacaaaatggatgataaatctgatgtttcaacaaaactacaggaactcacgcatgatgtacctaaaggaaactggttctagacacactataaatctgcggtagtccttttccatctcgaagacgaatcaacgntgtgtttagaatcagctgttcccaacatgcgaattgcgcacagaaaacggagcgctccattagagcgtgattaattaagtattagcctttttttttcaaaaatgggtccatatgaatttttgaagcaacttttgtatagaaaccttttgcaaaaaacacaccgtatagcagtttgagaagcttgcgcgcggaatacgatggagatgggttgggaaccctggattccaaacacagcccaagtctatccaaaatgtttagacaagaaaayacgtaacaagttggtttacagaaatacgaattagatcaatcctgcactacaagtagagtaaagtggtgaatttctcttaaatctctcgaatggtgatttaagaattcagtgcaaacctaatccttgctataatcaaatgttcggtaccgcatcaacggaacaataaaaagcacctggcataccataattttgtcattcttgttgaaatttgtaatttaagatgcatgagaccacacgaccttaatgttcaacgtgtcatgcattagtgaaataatagctcacaaaacgcaacaaatatagcaagataacggttgcaatccataccaaactaacgtataaagtgagcgatgagtcatatcattatctcctgcctgctaaccatcatgtacaccatccgatcccaaaaatgacaacttctagggatgaacctggacaaggtttagggtttagggatgaatctggacaaatgattgttcacgttcatccttagatgttggtttctccttacgggacggagggagtatatgtgatggacacaaaagttactttcatgatgaaaccaaaggggatttgttagggcacctaatagaacatctgtccaaatggcatgacttacttatatcctaataggatatccaagaaaaactaacactctaaagcaaccgatgaggaattgaaagaaaatacgtgccaacgcatctataaatggacaagcgcaatggaaacccctccttatcgttcacacagttcaagcattatacagcaaaatagaaagatctagtgttccgcagca

SEQ ID NO: 710 - DNA, 2000 bp, Oryza sativa
  misc_feature (74)..(77): n = any nucleotide
  misc_feature (84)..(88): n = any nucleotide
  misc_feature (124)..(126): n = any nucleotide
  misc_feature (144)..(146): n = any nucleotide
  misc_feature (150)..(152): n = any nucleotide
  misc_feature (1880)..(1882): n = any nucleotide
aggaaaaagaatcatccaatttagagttcatacgagtgagataaactagtttcaaatttttaaattttcaaatnnnnttttcannnnnggcttcttaagacgcccgtatggaaaaatagatttnnntatgcgggtacttaagtnnnccannngcaaaaatgagctcatttttgcatgcggacctcttaagtgacccgcatggaaaaatcagtttttccatacgggcgtcttaagaagccgtatgcaaaaatgaaggtcgatttttgcatacgccatcacttatggtctgtttgcaaaaattcatgaagtctagtatagaaaaatcgtttgtgtattagtgtattgcaaaacctgaaggtcccctctataatcttattttgtaacgaagggagtagcttgttactagctagcactagccagccgactaattaattttcacatccacgattgctgcgtctccatatatctgatgacaataataagtaataaaaagtggaatggacgatgttcctctcttctattattttgttcttgaaattcccctttttttgtaatgttcttagtaatttctattacgtggcttgttaattgtgaaagcggggactagtttcatgacctgtcaaaaagcatcccctttgccacccttgtagcagcacagtccatttcagatcttatcaagttcgccttggcctctctggtccaactgcttcttggacattctgttctttttcatgacgtctgtaaaagccatacacaataactttgtcatatactgcatgccagcaaaaaaataaattacaacgaagtatacatatagaaaaaatggctgcgatgactacacaaatatgtcaattgtgaaagcgtgaacaaaatataagtaaagctattgatatatatgttacttcccgttcatggaaaaatgctgttttggataggaggcaacaaaatcttgatttctttttaactcactaatatacacaaaaataaaatatgaatatttattattgttatatttaactgtcttttattaatataattatcaatacgaatgacaaaaacctatgaactggtgagaattaatgtgtcgagatggtacgtatgacgagtaaaaaaggaatacaatgagttgtttattttgcaataattaagatcatcgatcagataaaacaaatacactttgaaggacattaaactcacacccaagctaacaaccctcttgttttattttgtttcctttctcacaaaataacaaactctttcttgcccctcacttaagacctatattttgatatcccttatactttctttaaaaaaagggctggcacaaactgcaactcgacaggattatagcacaaattatttgtagcctttaatttgtatcattttttcacaaagtgattttgcgtacgtgcttcttctagccatatataatgccgtgccttgttaatataacctgttatccaatgtgcgcattaaagctatctatatatgaaatttgtgtttcagataactccaatatatatatgcttgatcaggcacgtctactgttgcagcttccagaggcattacttttaaaatatttgtttggaactattgtttttcttgttcaacaatttggatcaccatataagccatggaactaaagatcaacagattttgttaccatgcataactatgcgtcgcgtctgttgacaatgtgtgcattaattcaatttcttgcacggaagaatcaaaataagttgaaataattaaagagtgtggtgcatatcaatcccctttaaccaacttttatccgtgtgatgccagattaggcgtacgaataacaacaaaattttcattcaaaaccacaagctaatccctcatgaacagccaaaaaaaannntctccatttcctgaaccactttagtctttatagctatatataaaaccacccatagatgggagagcttctatccctctcatacaaattaacaatcaagaatttctgcaaacaaaaaaaa

SEQ ID NO: 711 - DNA, 2000 bp, Oryza sativa
  misc_feature (49)..(49): n = any nucleotide
  misc_feature (53)..(53): n = any nucleotide
  misc_feature (69)..(74): n = any nucleotide
  misc_feature (76)..(76): n = any nucleotide
  misc_feature (79)..(79): n = any nucleotide
  misc_feature (91)..(91): n = any nucleotide
  misc_feature (153)..(153): k = guanine or thymine
  misc_feature (154)..(154): n = any nucleotide
  misc_feature (155)..(155): k = guanine or thymine
  misc_feature (157)..(157): n = any nucleotide
  misc_feature (163)..(163): m = adenine or cytosine
  misc_feature (182)..(182): s = guanine or cytosine
  misc_feature (192)..(192): s = guanine or cytosine
  misc_feature (193)..(194): n = any nucleotide
  misc_feature (199)..(199): n = any nucleotide
  misc_feature (201)..(204): n = any nucleotide
  misc_feature (207)..(208): n = any nucleotide
  misc_feature (212)..(212): r = adenine or guanine
  misc_feature (213)..(213): n = any nucleotide
  misc_feature (215)..(215): n = any nucleotide
  misc_feature (231)..(231): s = guanine or cytosine
  misc_feature (232)..(232): n = any nucleotide
  misc_feature (236)..(236): r = adenine or guanine
  misc_feature (237)..(237): n = any nucleotide
  misc_feature (255)..(255): n = any nucleotide
  misc_feature (372)..(391): n = any nucleotide
  misc_feature (730)..(730): w = adenine or thymine
  misc_feature (1453)..(1453): n = any nucleotide
tcgctgctggtcccgcacgtcgccacacgatcgacgtacgcacgcgagngagntccaccgatggtttannnnnncnccnacggctcacacntcccccggtgcccaacagaaaccacacaccacccgcacgaaaaaaaccgaaccgcacgtgcknkcncgttcmaggcaaaccccaaacagasggcacggcgsnnaaccngnnnncanncgcrncncgaggagaaaacaaasngggrnaacaagctggaaaagccnaaggggaaaagaacggagcggaggcttcacccacggccaccgcgacgcgccaccagcgtgcggtgcaatgcaacgtacgccaagccgaaacggcaggcagcatcgcgcacgcacgcnnnnnnnnnnnnnnnnnnnngcgagcgacgtacgcgagtgcatgcagatgcatgcgcggggctcgcgcgagaccggccgatgggttcgcttctcttctctctcccgtcccgttgcgtcgtcatagacaaaagtcggttttgcttttggttttttggctctgaggcactgacgtgcgggccagcgtacgcctgcgtgccccgcatgtcatcgtcgacaccggccggggaccgggtaaaatgtgttgcgggagggagagggggagagagagatcgcgcgggcttcacgcaacggcgctacaaatagccacccacacaaccaccccctctctcacaattccctcagttctctgtctatctcwagacacacataactgcagtctctctctctctctctctctctctctctctctctctgcttcacttctctgcttgtgttgttctgttgttcatcaggaagaacatctgcaagttatacatatatgtttataattctttgtttcccctcttattcagatcgatcacatgcatctttcattgctcgtttttccttacaagtagtctcatacatgctaatttctgtaaggtgttgggctggaaattaattaattaattaattgacttgccaagatccatatatatgtcctgatattaaatcttcgttcgttatgtttggttaggctgatcaatgttattctagagtctagagaaacacacccaggggttttccaactagctccacaagatggtgggctagctgacctagatttgaagtctcactccttataattattttatattagatcattttctaatattcgtgtctttttttattctagagtctagatcttgtgttcaactctcgttaaatcatgtctctcgccactggagaaacagatcaggagggtttattttgggtataggtcaaagctaagattgaaattcacaaatagtaaaatcagaatccaaccaattttagtagccgagttggtcaaaggaaaatgtatatagctagatttattgttttggcaaaaaaaaatctgaatatgcaaaatacttgtatatctttgtattaagaagatganaataagtagcagaaaattaaaaaatggattatatttcctgggctaaaagaattgttgatttggcacaattaaattcagtgtcaaggttttgtgcaagaattcagtgtgaaggaatagattctcttcaaaacaatttaatcattcatctgatctgctcaaagctctgtgcatctccgggtgcaacggccaggatatttattgtgcagtaaaaaaatgtcatatcccctagccacccaagaaactgctccttaagtccttataagcacatatggcattgtaatatatatgtttgagttttagcgacaatttttttaaaaacttttggtcctttttatgaacgttttaagtttcactgtctttttttttcgaattttaaatgtagcttcaaattctaatccccaatccaaattgtaataaacttcaattctcctaattaacatcttaattcatttatttgaaaaccagttcaaattcttttaggctcaccaaaccttaaacaattcaattcagtgcagagatcttccacagcaacagctagacaaccacc

SEQ ID NO: 712 - DNA, 1999 bp, Oryza sativa
gcacagtgacagaattaaaatttctaggagtgataatgtaaagttagtttcgcagagaccagaggaaccttcccaaatgctagctaatcatttgaccggagcaattgataagacccacgttgatacagatgaaaagaatgctcgctcagatataaatgaaaaaacagtttgtggtattcagatgcagcttaaagaaagcactgcagcacacagatcaactgtgctgcagagtttgagggacaatcctatgtccaataatcttccaacattggatgtcaaatctcagatatcagttgtgccagacaagccttcagattcacagtcagcatctaaaactcaattgcagccctcaaatcataaaaaaactgctgtttgtagttcagatacagccaatgcaagtgatgcatgtggcatcgctaataatcaggtgctgttccctggtggtaaacatcaaacttcatcacaaggggaggatcacagcttgtacaagagggataagagtcagtcaggagatcaactttcatctcagcatcctgggaatgttttctcaccaagactactcacttcactgtcatccattgatataactgccaaggaaaataaaggaattaaaaggcacgtttgtcctcctggatttgaggagcttcacaggccgtctgattctgacaagattacatcagtaagctccccaacttcttctattatgtgctctggacctgataccctggtacaagattcatgctctgctaaagatcagccagacttcattagctgggtttcagagtgcctagaagatggtgagaaactacacaaagtaataggagcataccttctactctcagttccacagatgccacttggagatacatgcagtatcctgcctcctgtttttctggtgcatcaaatcactttctagtatcaccgtaccctagaggattgtcacagcacacggtgggtcggattgaaaataccatgaattgctgctgttcccatccatctgtcagtggcatagcaaatcacaagcctgaatactggagtggaagtgaccatagctacatgtctactgggggatatgatgtattcagtcaaagtgcaacattaggcatgatagctggtatggtaggcacatcgccccaacaaccttcgccacctgttcattacaatgactggaccacgggaagtgctgattcagatttgaagagtccacaggttgatcatacataccccatgtactcgctgttctgacgacctggcggagtttgccttcgcaacccctaacaatagatgtacaagtaaaatgcatacctgctaatctagcttgcaaaatggtgggtggtagcgacattggcaacgaaaatgcttcgtctgctgaagcttgtaaagaccaaatgtggagcttcatgtacaaaaattagagtacttgtgaacatttggtcatggaacaatccgttgtagtgcgttgccattgctgtacagatggcctccatttcttacatcttgatgtccttgttcttgtgtttctaagtacttcctccgtttcacaatgtaagtcattttagcatttttcacattcatattgatgttaccaatatgaatgtgaaaaatgctagaatgtcttacactagagtgcatagagcatgcttatctggttttcgatgcgtctctagaaattggacgaaaaggctaaccatcagtgaatgtgagaaattgcaacaccgagatgcaaaaatttaatttgtaaacacgattacatgtaaatgctccttgatggtctagtgcttatctaagcgaaaaaatagtgcttaagcttaacaagcacttcgagcgccccattacactttgatcccatcaatacaacattttggccataagaatacagcatattgcctttgttttttaatgtatgatgtaattgatattttatttctttgactattcatctttctgaaaaatgttttcacaaagaaaaacatataaatagggacaaatctatcatgta

SEQ ID NO: 713 - DNA, 2000 bp, Oryza sativa
  misc_feature (948)..(948): n = any nucleotide
  misc_feature (950)..(950): n = any nucleotide
  misc_feature (955)..(955): n = any nucleotide
  misc_feature (959)..(959): n = any nucleotide
  misc_feature (963)..(963): n = any nucleotide
  misc_feature (971)..(972): n = any nucleotide
  misc_feature (1007)..(1007): n = any nucleotide
  misc_feature (1008)..(1008): y = cytosine or thymine
  misc_feature (1009)..(1009): n = any nucleotide
  misc_feature (1010)..(1010): k = guanine or thymine
  misc_feature (1011)..(1011): n = any nucleotide
  misc_feature (1012)..(1012): y = cytosine or thymine
  misc_feature (1013)..(1013): n = any nucleotide
ctggttcccccttcgaaaaagttaaaatactagtgaacatcagaacatgttttagacaaactagataattttaagggtttgttttggttgcagggcaatgacatgacaactaaatagaagagtaatttaggtagaattcgcgggctgggctacgaccggtaaactgttttacatatgtataggtcataagtgagatggcatgcatgatgtagctaggatattttgttttcctatcaaacagatagatatcattgtctacatatttgttgttgactcatataatatcaaacaggaatgataggttcatacgcaggtaaaattgacgaaaatatgcatcgtcatctcgagtggagaaaaacaaacacatgcatatatgtacatgtcgccatcgaacccctgctataatctaatcttcttgcttttctcagtacacgcacgcaactactatctaggaatcggcagctttaatttactgatgccatcataccgatcgataattataagtactccctttttaagcctttcctagctactagtatatgtctatatatcgtacgttattttgtcatatatatactctgaactttttctaagaaacaagctaaaaaatctagctagctttttaaaatttgttgtgtgtgctgaatgaaaataatcacttcaatgtgaatgaagggataaacacggcatgcatatgacatatattatatattcagatttgattcggccgatttttcggactttaaaccgccggtggatatatatgagtcgtagtacatgtttcttttttcaatcgatcaattaaatttgtccgtgtgaatgaattgatcatgtattgagcgatgtgttgatcaagatcaattagcaatcttctttttcggagaaaagttaaggaatcgggcgggttttgtatgtatatataacagtcaagttgggcatgcaatttgnanggatngttncatnagtgtagnntgcattaatacaattgaattatattggcgaatatnynknyntatgatactacaagcatacatgtgaaccaacgggcagaaatacgattgtggagtcaaagcttgttactagtttgcgacgcaactaagcaagcaagcggcggcggctggattggattggattagataatttctccaactcagcgtcacaaaagtacagcacattataccagctatagcagtatgcaagttaaacatgcaattgcaagcaggttaattcgatcatatatatggtcgtccatgatagtataacgtacggtgagtccaatctggccaatcaatcaagcagctgctggctagctagcttgcactgaccggccatctctcaagcgttgacttgattaattgcttctatgtttggcacccaattaattattttttctaataagtttgaattatctgcgcagatgccatgatgcatacacacacaactggcgcaaattataagatactcccaccattttatattataagctgtttgactttttcttaattaagcttctttatgtttgattaaatttataagaaaaaatactaatattttcaatataaaacaaatatattatcgaaatatatttaatatcaaatttaatgaaattatttaatttggtattgcagatgttgctattttttataaatttaatcaaacctaaagaattttaagtaagaaaaaactgaaacgatttataatatgaaaatgatgagtaactttatgagctacagagagagaaacgacagacataactaacaatatcatcaatattaagaagatgatgagatggcgcgtacgtattatatcaagtggagtagctcaaagaatctataaaaggcgcagcccgtcgtcgagccctctcatccctcttctttgtctgatcgatcgattgcttctccctcctctcgctactagactagagagtaggtagagctagctttctagctcgtggatcgttaagtttgtagtcctgcccgggcgccggcggtgaggtcgcg

SEQ ID NO: 714 - DNA, 2000 bp, Oryza sativa
attaaatgtgaggtgaaattttagttctttttcaaacctagagatgcattggctttataaaaaggaggagatataacatgagttcgcgaagacaatgaagtaaacttgttgttgagatacattagcaccgacttattgatgatactaaactggactgatgagatcgatgatatgtgttatccttatgtgcaaagaagcaacatcctcttgctgccgccaccaaggaggcatgttttctatatggtctttgactcattctgtggcttttagttctagcatatacgtgaacactgagatattattgatgtcactattcatgagaaagagaagaggacgtcgttttcatctccattattggtttatgagaaagaggcatcttgcgattatagtgtgtaagaggaatatatggtactatacttccatatcgtgcaatgagatagtagtgtttgtttcgaatgggcatatctagggctagctagtgttgcatcctatggttcatggatatggttcgactaaggccacccatgaaaaaaaaaccccttataatgcaatgattttagttgggcttgctaaaagctttcaaaattctccatgttgactacatgtctttaaaacttaaacaaggtgctactccatgatatcgtgttagcgagaaaatgttttctcatgtagtgtataatataccagtaacaagttaaagattgttgaatccttacatactccctcaattctataattgttgttgttttcgataactacaaggttttcaaaatatatatcaactatatattttattattaacatttaaaaagtaattattggattttattaacgtattttaaagtctaatatgtacatcattctgccggtgtttccaagacgactattttaaagtttatagtattcaaagtttaagtaaatttcataaaactacatatacttcaaccaaaaccacatgtattttttttataacttttggccttaaatatatatagttgtatgatatttttttatgggggtttttatgataaattgaccttaaatatgtagcttcgtgataatttagtgctaaatatgttgttctacgataggtttgtcaaaatatccatagtttggtgaaatttactcgtgaagtttgaattgtttgaccccaactttatacaaaacataaagaattaattgtatgtgcaatctcattaattactcgctgcaaaatttagagaaccctacaaattggcatgccgtttcaagaccgggaaaatccctgtctgtatattaatgagcagattacaatcatcaatcacgttgtaattaatgcgtgcataaaaaaaacacgggtacacgtgatgacccgtctcgatgatctacacgagccagcagtctctccctctcatctaggcccagccggaaaagacacgaatcgcacggcccttggtacggtttggattaagtctactttgcatccctcattcattatcttgatccaaccgtaaaatcggatataacacagttcccatctttgaaaaacgggtacaaattatcttcttggtggttttgaaagcagtttctgtagatggagcccacatattaacgaggtatgataaaaatgttagaaagtgatagacaaacaaacgataaaaaacaatagattaatcgtataagacactagatttaacgtgaaaaccctcccaaaacatgagagaaaaaaccacgggcgccagccagcaaaatatattcactatatcaagggtgaggttacaacgccgcacggcggcttacaagagatatatatatggtggaacactaaaagggatgacgatcggtacctccggcccaagcctaccggcgacaggcctccgccccacatctccctccctcttgcttcgaaggcagcagcggaggcccgcgcgccggatctcggcccagcgggaagcatacggtccggcccaatacaacccgttcgtggcaaccctattccagcccatcgcgcccaccgcatc

SEQ ID NO: 715 - DNA, 2000 bp, Oryza sativa
atttggacaataactatacgcctatacacccagattcagccaaataagctgtaagcacacaatgccaatatatgtaaggctgttccttgaatatgaactgaaaatagacaaggtaggcggtcactctcaccaccgtatgtatcatgtaagggtttactgcaagccacaatagaggcaaaaattaaaatagaaatggatcgtgcatgtgggctaattaatcatggaggaatctgatgactactattattattacccgaaaattaacagttctcttcatttcttgcagtagatttgacatccaaaccacttgatggtgaaccgacaaggcatacaagggaaaggggtagtgaagttacctgctaggggagagatcttgccggcttgctgccactcctcccgaaagcaatctcgtgttgctgtcgccagtcgacaccaccacgggcacatggccgccgccaagctgcagtgcctgaccgacgccgaatccgaatccgaccgcgagatgcgcgtgcagcgttcgtcggtgactggcgcgagatttaggttgtgctaggttatcggtttcactctgtcacaattaaggttgaataagttgtgacatctataaaagtttgatggataaattgttaatcacaaagaatatgtttgattggcaactaaatttgctacacctaatcataggtaagtcaaaattttagtagacagtgttcagttcatgctataactttgctttgtctaaatcttagtcacttgatctatgtcatacactttatttatttgtctaactttgcctatacttaatttgtcattttgtttgctacaaaaatgtgacaagactaagcttaaccgtcttactccgtagtaaaaaaatacgtgacaatatttgtccctaaccgatacatcatctgaattctgatgatgaggcgttttctctgatccagacacgcaggtgatgtttggggtcgttgggttggtccgcgttcttgcctcctggttggccgatgtttggtcactgtcgaattcatcacatgccacacaggatctctgcagaaactcagctctgggcgatggctcatgcagcgtctctgcagaaactcagcaaaacgcgcgacatttgtcaaggcaaggtcggtcggggccgttgctctgctgctggagatgtactgcgcacgtctacgcccccagtttttcctttgtttttttttcttcatctattctcttccttcttttctgttctgcatttctgtcgcttcctctgcatgcaacactatttccagctcacctcctttactttctgagacaaaaaccgaagaaatgggtagcaaaaagacaaaaggcagcagccgaacatttccctttccgttttgtagtttattgaacagcgagtcaatgttgtttctcaaacatcctcccgagtgcccagccccgagttgtctttggatgtttgcactgtcccatgacgtgatgccccttccccttctagaccatgacatggagacacgtccagttggaagtggaagcttgggacacgaatccacgcccagaacacacgccgttttctgcatgtcacggccatctcgtgcgtggcttgggtatccaaaacgcgcaccaacccagcggccgtctctcgtgatctcgtcggtctcgtcacgcacgcccgctccgctccgcctgcgcgagctacacgcgcgaggcgacgcccatttttgggattttggacgcacgccgcggcccaaccaccctctcgtccccaccccgctccgctaaaacctctctttctcccttggcttcttcctcccgagctttctcctcctttggtttctactcgagcttccgcccccttgcgcacggcacggctgcgcgaggcctcgtacgcttcctccacctccggctctcgccccgcgtgtcagtgcccagcgtgcgccatgcgtgcgacgacgggcgcgcggcatcttcaccccccatggaggcgcgggctgaggcaccaccgacagtcgacg

SEQ ID NO: 716 - DNA, 1999 bp, Oryza sativa
  misc_feature (1696)..(1696): n = any nucleotide
  misc_feature (1702)..(1702): n = any nucleotide
  misc_feature (1710)..(1710): n = any nucleotide
  misc_feature (1712)..(1712): n = any nucleotide
  misc_feature (1721)..(1721): n = any nucleotide
  misc_feature (1738)..(1738): n = any nucleotide
gtcaatatataggcatgctttttttaattatgttgccgtgcaattatgcgtttgtttagtgtgcattttgttgtcgggttagtgcgggttaaaactagtcagcctatcatttttactcctaaagatggtaactgatcgatcagctcgatcggacaataaacccactgccactaccactagtactaggttagcctagtcctagtagcatgtaggccttctaaagttggaagtttgggttaaaattgatacgatgtgactgaaaagttgcgtgtgtatgacaggttaatgtgatagaaaaagttgaaagtttggatctaaatacagccgtagcatcgcaaatcagacgagctagctagtactacaatttaatcatttccagcctcatcttttcacttatacttatcagaaaaaaatttaaaatttcaatcttaaatttgaagctgattttaaaatcttttcatcggagtttagtttttagcatttacttttaaatcgttaggaacacgtatataaaagttttattaacaaattacttttcgtttgcaaatatgatgtttgaacgatggggctgtttgtttatgcttattcgatccgcttactaacaatttaaatttgtaaataaaacatttatatacacgtccaatttaaaagtaaatgttataaagcaatctataaaaaaaccataaaatcaactccaaaattaaaatttaattttggcttctaggtataagcataaacgaaacaattggacttaaaaaaacattgtcaggcgagtttttctttagaaaaaagaaatgctgcatgacagcatcccattccgacgggatgacacctcatcttgtccaaatgtccaaatggggtatcaatcgatacctactggatatcatacgatatttgcgaggtatcatcccgttaaaatggggtatcagttgatacctactaggtatcatacgatatttgtgaggtatcatcccgtttgaacgagttatggttcaggagcatttttcgaaaaaaagaacatgggcaggagcaatcacccaacttcctggaagttgcagccttgcaggtgacgcggctagatgggcccggagggagcacgcggcgcagcctctcgtggacgaacggcccatcgcacgaccagagcccacagggatacccggcgcgcaggccggttaacagagatgcctcgaacgcaggtgcaggcctggacttgtgttgtagccctgcagcccgcaccggaggactagcgattagcgaagccgcggtcacgcacgccacgcgttcgatcgatcgatcatcgatcgcgaaaaccctgccactggagaaatcctattcattatcgcctagaaattcgattgttaagcttttatctgctaaatggagtatatgactactgcatgcgtcaccaagataagcataacgtacgtgtgccgcttcggtgctgctgcgttcgcgaaaaatcattgcgttcgtttcggtgctatgctgtgtacggccattacggtgtaccgtcgccgcacatatccacccacccagcacacagacagcagcgacacaagttacaacaatatccaggtgagctgggggccctgaacctacaattcctaggccactctcacgccagcgccgcgacaaccacccaagtttggctagcttcccaaccctgacgtcacgtaagcttttgccaattccgccnaagccnaagcccangngggcacccntttaagcggcaccgcgnaagcgcgacccccctcgacgtgtcctcacaccacctcgtccctatccatgatcgcgtcccgcccgcgcgccgcgcgcgcgcgcgcgtccttccaaacaccaacccgcgagtccttgagtcctttccgttccgattcccccgtataaatccccgcgccaccgtaccacgggctcccgcatccatcgttctcgctcacttctcacaaacacaacaaaaaacatcgtcgcagacaaaaacatcgtgcacgttggttgcgtgtca

SEQ ID NO: 717 - DNA, 1999 bp, Oryza sativa
  misc_feature (181)..(182): n = any nucleotide
  misc_feature (214)..(214): n = any nucleotide
  misc_feature (219)..(220): n = any nucleotide
  misc_feature (273)..(274): n = any nucleotide
  misc_feature (281)..(281): n = any nucleotide
aattagcaaataaggtttgaagccgtaattctatttttataatttaatcattcttaaatttagaattactaaaaagtaattaattaataatgcgttgtacttgatctagagtctcaaatcgtttttatgatgatttaataatttcaaacataaatacagtaaagtgctcagtttctaatcnngaaatataatataatgattctaatctttaaanttaannaaataccaagtttgatattgataaattaaaatatatagcatgtgcagcactgnntgatgcntagtcctagaatctttaatcgcggtaagctgggttaactacggtgcgggccacgtacccaaatttctttcacagttggattgactagtgtagtcaaacgagggcatgtgacgaaggctagctattttaaattttccgattgtccctacataaatcaggctataatagcccccagactacacgcagggactacaaaatcggtggtacccccatcctcctcccccttctttctcccctcctctcccttctcttatttctcaatccggtttttcttgaagtggcagcggcgtggagttctcaacggcgcgcggcggtgctgcggtgcgacggctcgacgcagcggtgaggaggcgaggaggaggtgaacggcggcgccgcggcctccatccccgaccgccgggggccacctccatcccccaactgacgggcgccacctccgaccgcctggcgctagatccgtcctccacaaggtcaggggacgcggatccggccaccgggcgtcgtctcctccgtccgccggctgcgtccccaactgacgagtgcagaactgcagattcccccgtcggctgcttccgggtgcagaaggcgaagagggcggcgtcgaggagcagtaatagggacgaggtcatccgcaaggaggaggagcaaggtcgcctccaggccgagctcaagaaggtctagtgcgccaaggagttcaagcccaccgtggtatgaagaagccctgcccggcaaaacccacaaccatttattcccttcgtttttgttgctcgtcaggtgattgatgaattgcttgcttgccatggctgttttatgtgtgatgaaatgttcgtgaagacttttctgtgtgatgaaatgttgtgtgtgatgaatgcgatggcaactacccagaagcacttttttttggtttttttttatcgaaatctacatcagtgacgggtgttgagctgtggttgtggctcttttttccttttttttttgggtgatttttctcatctgtgacgggtcacatgacacaacccgtcaaaggtgtttgtcacctctgacggacctacacccgtcaaaggtgagttaagtcatcagtgaccattgatctgtgacgagggagtctatccgtcacagaagagggtttgagcccgtcactgctagcttgttctgctgtagtgtgtgcgttatgtcctttctgaggaaccgatttagtttatgactcatcaattccactttacatatcaaaaggtttattatgggggcaatgcttttgtgaaattgaatttgtattttgtgtcacgttgtggacatacatatcttcaatttataaataatattacaaataggtggaactgaagtaacttcgtttgtaaggatcaaaatctgatagtggcatgagcttggagtttcaaaaactttttggtcaaatccgtttttataaggctggtgtattgctacagaagtaaggaagaatgtcatctcgtgttccaaagcccaaaatgacaaactaaagcttggagttgatccatacttaagtgtcagaaaatcttttgagtgtacaacagatatgtgtattctgaagttaaacactacctacctaacgttacaaaacgtcatttcacaaaacaatgtatctagataaaaaaatatgacatgtaaagtgagtaatgactcatatttataatcaaaaactgataacaataagatgagatagttactaaagtacctttgacg

SEQ ID NO: 718 - DNA, 261 bp, Oryza sativa
  misc_feature (1)..(3): n = any nucleotide
  misc_feature (5)..(7): n = any nucleotide
  misc_feature (9)..(13): n = any nucleotide
  misc_feature (16)..(20): n = any nucleotide
  misc_feature (22)..(22): n = any nucleotide
  misc_feature (24)..(24): n = any nucleotide
  misc_feature (80)..(157): n = any nucleotide
  misc_feature (181)..(200): n = any nucleotide
nnngnnncnnnnnccnnnnncntnggccgtagcaacgaaccgccatgcgtggcgtgcaaccgcgacggcctcatgccatnnnnnnnnnnnnnnnnnnnnnnnnnnnnnnnnnnnnnnnnnnnnnnnnnnnnnnnnnnnnnnnnnnnnnnnnnnnnnnggatcggcctcagttccagccatnnnnnnnnnnnnnnnnnnnnagaggtctgagaagaggagagagagccttctgcctgacaagaaattctgagaagagggaga

SEQ ID NO: 719 - DNA, 2000 bp, Oryza sativa
ctttctctgtcctccagcttctcttcctttctctgtcctccagctcagattgtgatgacctggacgggctaatagtaggttgattagtccttattgtacttgccctaagctgtggaggctagatctaccacccaccgtcatcactaagcaccgtgtttgtcaggttcactattcccacgctgttgccgttgtccccgagggcctcgttcaccagatcaaccgctaccgtcgtcgatccatcgtagtcgccaagggtcatagccgccggatccaccactcccaagcctgccgccgacgaatctagggaggtgggcacaccatcattgatccgcgcctcaaagacacatggccgctgaatccacgtcctagggacccgaggccattggatctcccgttgaattgaagccgctacccggatctagccgtcaccttgaccaccatcgctggatgtggacgcactaatcgttgcgcgcgcggttgagggtatcgtgcatggcagagcttgtgcggccttggttccgtgtgtcgccgccttgatctgccgtcgccgagagcccccaccttggatttgctcgtcgcaaagcacaactgccaagccccatctggatctgcccgcgtgctaccgccagaatccgccgtcgagccccgcctggatccacccgcatgctgtttcatggatccgctgccaagctccacctcggatctgcccgagcactgccacataggggtgctgccgcctcgtgcttggagaggagggaggagggatcaaaagggagtgagggtggtgataagcttgagagattgaggattagacttaagaaacgtatgggtggagaggataattgcttttattgcgcttgaagtttatttattttttaatagtggttagctaagagaactgtttgtgaattttttttttacaaactgccccgttaccccaaccgtaaggaaaaatagtgttattttcacctgcggtccttttaggacgagcacttatataagttgattgtcgcaagtcgttactccctccgtctcataatataagggattttgagtttttgcttgcacgatttgactactcgtcttatttaaaaaattttggaattattatttacttttttgtgacttactttattatccaaagtactttacgcacaactttttattttttatatttgcataaatttttttgaattagatgagtggtcaaacactacaagcaaaaactcaaaatcccttatattatggggcggagccgcggagggagtactaaccaaggattttccgattgcattttcacaagcgaaaataaggtgacgtcatgaaaaaaacattttttttaagtagagaacgttcaaaagcatccaagtgtacaacgtgatctccatcccttcaatttttctattagagtaagttcaatagtatagccaactactagctccaattaatctatagccaatctaatagctcatccatacaatagttacatactacactattaatacctggtcccacctgttatagacacactgcgtcttggagtccgtgctacagccggctacaaatctgtagcccgctgctattctctctcctgatttatcttcttaaaatatgtttgcagctgacttatagcctgctattgtacctgctcttaggggtgcacataagtttcagctgtcagttgattcttccggagttcgtgaccacgtcagagttttccgcctagcatgcgtgcagaccgacgaccagtcatgcatgcatgctgatggacgcgcgctcgtacgtgttttcaattttcaccaagcggagccgatcccgcgtacgtgcgcgcagcaaccaagagagaggaaactatataaagcacacctccgttccatgagctccacactcatcatccacagcaaagcaactcaagccaccaccgatatatcccggtgagttacctaagatctcttgctcagagcgtgtcgaaagagtacgacctcgggctttcagcagcc

SEQ ID NO: 720 - DNA, 2000 bp, Oryza sativa
  misc_feature (106)..(106): n = any nucleotide
  misc_feature (612)..(612): n = any nucleotide
  misc_feature (623)..(623): n = any nucleotide
  misc_feature (635)..(635): n = any nucleotide
  misc_feature (643)..(643): n = any nucleotide
  misc_feature (650)..(650): n = any nucleotide
  misc_feature (707)..(707): n = any nucleotide
  misc_feature (757)..(757): n = any nucleotide
  misc_feature (809)..(809): n = any nucleotide
  misc_feature (1562)..(1562): n = any nucleotide
  misc_feature (1941)..(1941): m = adenine or cytosine
  misc_feature (1942)..(1943): n = any nucleotide
  misc_feature (1946)..(1947): n = any nucleotide
  misc_feature (1965)..(1965): k = guanine or thymine
  misc_feature (1972)..(1972): n = any nucleotide
tagacttgagacttgatcatctcattgattagtttatctataccttctataaagtttcaacccactacacctaaagctcaaacgacgtaattatggtatttattantactcctaaagatcaacatgcaagcatgcaacatcaactcaggtaagtactcaaagctcatatacaaatatattaattatgtttataattttatttcattctaaaactcaacataccatatgctaaatcatcattccctaatcattttcacaatattttacaaattcaagtaatttcatcatttctataatattttacatatatcccacgataaaaagcgagacaccatgaagtaaacctgacaactgcacctagattttggggcatttaacaatttgccacttttaaagaatcaccaacagtcctcatatttcatcccaaaaccaattctgagggatttagtagaaaaaaaacaatccaacagatctcctactctattgcatgatttttgaagttctcccgaaatattcgctctgttgatgtgggagaaagcggcgccctcgtccactcccaatctcgcctctaccaccttgctcccgcaccgtgcttgggagattggcgtggcntcagagggagngcaagaggtagngtgctaanggaaatnctgttggtagtttaatagaatagcccatttttagcttttggggatacaatttaggtnttctcctgaagagatcagttattttctttcctatcttcagtttagcaaancaataataatttttttgggagattatacacagtttggtgatgctctcaagangcggtaattaaggatttgtcactcacaatcaatgatatgatacatgatatgtggacgcttatgtgtctatgacatgtgagttcagtggtaaatttttaattatcacacaaattgcatcaacggtacaacaacttagcaggtgggtgcgatatattacaagaacttgagaattgaatgtccgagtgcaacaacttgataagtgggtgcgttctaatacaataacttgacaatttagtattttggtgtatcaacttggctaagcatatgctaggcgagttttttttcacgatgtcaatatgcaattacatagtaatcctacagatattaccttagacattgaatttaatcttgaagaattatactgcacacagagtttacatccaattaccttaagatttttttcttcaccttctcaaatatcaaccgaaatataatttacatccagtttaattgacttttagttattagttattagaataaaaatattaaatatgcttatacaaatccacgctagtatattgtaaaaataattacttaaaaattgaatctatataaaaaatgctccaaataattaagttgtcgctataacttcttagtttattgtatgaaaatcgtacatatcttgcaagttgttacatttatatgattacttataaagattttatattaaattatatttgtctaccaaattgttgtactagaacgctcacctgctaaggtgatgcaccatgggtgcaatttacttcctagatntctcacaaaatcttgctttgcctcctatgatatctcaactaaccctcaacaaaaccgcgcctttaccgtcatcatctcacctatttcttctcccaaactccggcgactcctccgctaatcccctccggcgccgcctcctctccgctccccgcgccccccacctccggtcacgcccgatcggttagtacttactcggaaccctccctttcacctccgtgttcaattcagtccaaacctcccgatttctgcttctcccctcttcccgcaattcgggggttccaagggttcttggaacccaaagttcttggtgaaatttggggtccctagttcgattcctctttttttattattactagccacgagatggtgtatgtaattmnngtnncgattctttgcaggattkgttgagntgcctcgagggatttttgctctcgaggt

SEQ ID NO: 721 - DNA, 2000 bp, Oryza sativa; identical to SEQ ID NO: 711
  misc_feature (49)..(49): n = any nucleotide
  misc_feature (53)..(53): n = any nucleotide
  misc_feature (69)..(74): n = any nucleotide
  misc_feature (76)..(76): n = any nucleotide
  misc_feature (79)..(79): n = any nucleotide
  misc_feature (91)..(91): n = any nucleotide
  misc_feature (153)..(153): k = guanine or thymine
  misc_feature (154)..(154): n = any nucleotide
  misc_feature (155)..(155): k = guanine or thymine
  misc_feature (157)..(157): n = any nucleotide
  misc_feature (163)..(163): m = adenine or cytosine
  misc_feature (182)..(182): s = guanine or cytosine
  misc_feature (192)..(192): s = guanine or cytosine
  misc_feature (193)..(194): n = any nucleotide
  misc_feature (199)..(199): n = any nucleotide
  misc_feature (201)..(204): n = any nucleotide
  misc_feature (207)..(208): n = any nucleotide
  misc_feature (212)..(212): r = adenine or guanine
  misc_feature (213)..(213): n = any nucleotide
  misc_feature (215)..(215): n = any nucleotide
  misc_feature (231)..(231): s = guanine or cytosine
  misc_feature (232)..(232): n = any nucleotide
  misc_feature (236)..(236): r = adenine or guanine
  misc_feature (237)..(237): n = any nucleotide
  misc_feature (255)..(255): n = any nucleotide
  misc_feature (372)..(391): n = any nucleotide
  misc_feature (730)..(730): w = adenine or thymine
  misc_feature (1453)..(1453): n = any nucleotide

SEQ ID NO: 722 - DNA, 1999 bp, Oryza sativa
  misc_feature (103)..(103): r = adenine or guanine
  misc_feature (132)..(132): y = cytosine or thymine
  misc_feature (174)..(174): r = adenine or guanine
  misc_feature (222)..(222): y = cytosine or thymine
  misc_feature (827)..(827): n = any nucleotide
  misc_feature (841)..(842): n = any nucleotide
  misc_feature (1647)..(1647): n = any nucleotide
  misc_feature (1671)..(1671): n = any nucleotide
  misc_feature (1679)..(1679): n = any nucleotide
  misc_feature (1715)..(1715): n = any nucleotide
  misc_feature (1775)..(1775): n = any nucleotide
  misc_feature (1792)..(1792): n = any nucleotide
tcgccgtagcccaccacgatgacgccgtggttgacgtcggcggacggcggtgcacggccctgtgtagacaccgctgccgtagagctggaacatgaagttgccrgcgtcgacggtgacggacaccggctgcgycgccacagccctcgccaggtcgggctcgctgctggtgtcacrttccggtagcccgcgatgctgaccgcgctctggttcagcttcgccgcytggcacgcgctgttcgcggcgtggtacggctagctcgcctccgtggtgactggtgaggccgtggttgccgacgatgaactcgaacagctcatgtacccgccgcaccccacggcctcgtcgtcgcagtctacgagctcctgctccgacagcgacaccagctcaccgttcttgttgatcccctctatcgccgccacggcggagaacgcccagcaagaacctgcatccacacaacacccagatttccatcgattaatctccaacatttttacaggtttgaatctttctttaccatgctattgctcacacaccacaatcttcttggtacttcacttccaccactgctcctttcttcctccaatctacgctcttcggcagaatatcatcactgctctctccaggcattgctctgaggaattgcgacatgaggtctgaaccccagcatcttggctctgaactcctcgttcgtcaggtcggcgaacgtacttcttgtcagccagcttgtagccattgcacatggagttgaacttctcaacaagctcaacgttgctcctgtacacctcgaacctcctctgcttctcgtcggcagtcgtgcagctcccggcacngcgctcgcacgagnnctagctcgtcggagacgggcggcgcgccgcggccccgatctcctccacgagcccccgcgcggggtccgcgccgacgccgtgagcgaagacccagcgctcccgccgccgacgccctgcccactgcccttctcccacgtcgccggccgccgccgccggacctccccgtggccccgtggcgcctggagggaggagaggggagagatggtgagagaggaggaagaagaggaggggtgacaatgatatgtggggccatgtgggccccaccattttttaattcattcttttgttgaaactgacatgtgggtcccatgagatttattatttttcggatcgaattgccacgtaagcgctacgtcaatgctacgtcagatgaagaccgagtcaaattagccacgtaagcgccacgtcagccaaaaccaccatccaaaccgccgagggacctcatctgcactggttttgatagttgagggacccgttgtatctggtttttcgattgaaggacgaaaatcaaatttgttgacaagttaagggaccttaaatgaacttattccatttcaaaatattctgtgagccatatataccgtgggcttccaatcctcctcaaattaaagggcctttttaaaatagataattgccttctttcagtcacccataaaagtacaaaactactaccaacaagcaacatgcgcagttacacacattttctgcacatttccaccacgtcacaaagagctaagagttatccctaggacaatctcattagtgtagatacatccattaatcttttatcagaggcaaacgtaangccgctctttatgacaaaaatagntgacacanaagtgttatctgccacatacataacttcagaaattncccaacaccaagagaaaaataaaaaaaaatctttttgcaagctccaaatcttggaaaccnttttcactctttgcagnattgtactcttgctctttttccaaccgatccatgtcaccctcaagcttctacttgatctacacgaagctcaccgtgcacacaaccatggccacaaaaaccctataaaaccccatccgatcgccatcatctcatcatcagttcatcaccaacaaacaaaagaggaaaaaaaacatatacacttctagtgattgtctgattgatcatca

SEQ ID NO: 723 - DNA, 1999 bp, Oryza sativa
  misc_feature (341)..(341): n = any nucleotide
  misc_feature (1123)..(1123): n = any nucleotide
  misc_feature (1125)..(1125): n = any nucleotide
  misc_feature (1561)..(1561): n = any nucleotide
  misc_feature (1570)..(1570): n = any nucleotide
  misc_feature (1573)..(1573): n = any nucleotide
  misc_feature (1578)..(1578): n = any nucleotide
  misc_feature (1581)..(1581): n = any nucleotide
  misc_feature (1584)..(1584): n = any nucleotide
  misc_feature (1587)..(1587): n = any nucleotide
  misc_feature (1637)..(1637): n = any nucleotide
aacacaaacgcggccaaattactagagaaaaattacaatttgtttcattggaaaaagaaagtgtgcgacgatagaaaccagacctaaccaggcatggtacacgcatgtggcaagaatggtagtacttacttttagatcaattggtaaaataaaatatgatacccgatacttttagggtaaattggaaccatgccattataattttacaaagtttgagatatgccatcggtatctcaatgacatgtaggacccacatgagtcaatgacatgtgggtcaggatgatatatcttaaattttgcaaaattataatggtaatggttctaattttcccatacttttntgatacataataactccacaatacttaataattgatactatcttcattctaattgaaaaagagtttattttttttataaggatctgaaaaaaaacttgtccatatttatatataagtgaatttttgagatggaggtatcacacccataatattcataggtactataaaatttggtaccaaaaggttcaagtatcatgatattgatctccatgacaccaagataccaagatacttgtactatgacatttggtacctaatggttcaattatcattatacctaatatcaccatgatatcttaagatatcatgatatatatttgatacatttatgatatttaggtatcatccatatctatatctatatactactcgtacctgtttaatggtaccatcatacatgataccttcatgatacccaaagaaatcatggtatttaggtatcatccgatatttttatatttattgaagttatcataatacctgaaactttcataatatctgatgatactacctctatattttaatagataacgccattaatttttaggcagacgttggacccttcatcttattcaaaaattttagggctaattggatccataccattaaaaatatgttggttttgaaatatgacactagtattcacgtatcgggaaccatgccattataattttacacgtattcaagatatgccactaccctttggatgcatttacaaaaatctggaccaaactacccttttccccttattccttctcccttcttcccctttcttcttccgncnctcctccatggcgtgacctgactggcgatggtggccaccacagtcacacctcctcctttctctagcactctttcgttcgtgtctccctccaccttagcccgccgccggcctcctcatgcgcgtcatctccctccacctcgacccgccgccggtctcctcttgtgcatcagcgcgtcctagatccagtcgcctctcctcgccgtgtgaggagctctgggcaatggcgatgaccaaagaattaaagagcggccacttctctctggcaagctcctgcacctccctccctccctccctcaccgcacccgcagcttctccggttcagcagctgcctccaccacctcgacgcccgatgcagcgaggacggccttcgtgaagagcctcggcagatggcggacctgcggtgttctgtccggcgctccgagctcccgcgacggangtcgcaggngangagangtngangangagtgaagagagagagatagaagatgaggggatttttcgtccaatacatncaaaatacgtatcttagtggcaccattgagattacgaacaagcagcagtggcattgttacaaatacacaaatagtaatggtatattttaaaaccggcaattttttagtggcacgtatctaattaacccaaatttttaatatgtgagtgtgtacgttctatgaatctgtcacaagtcatgacgccgcgagccgcgtccagctacaaaccactcaacccaaacgcatccaaaacccctcgctgagctgccatgcatgcactccccctcctcccactataaattatcaccacctcattcccgccatgtctcaccaccaccaccaccaacactgcaacacaacacaccaccatgaagacggcatca

SEQ ID NO: 724 - DNA, 1999 bp, Oryza sativa
  misc_feature (248)..(248): n = any nucleotide
  misc_feature (959)..(959): n = any nucleotide
atatggcgctgctagtggaatcgacgcttctcgcctcgccaccggaagcacccctagttcaccgctggtgaggtcttctgttatatttcgtccacctcttctcgatagtccacctagccgctaccttgtgtacgttccagcttgccagctagccggcaactggcttcgatctcctctccctccatcataacagcggcacccggtgctcctctaacatggcagcttcgtggtggcttcatcttcttgtnatcttctccaccgaggacccggtagggggtggggacccgtaagggctagggacgggggcaaatatcccccaatttggagatcggggctggggccgggtgacgaagtcgggggtcaggtactggggcgttgggctgtcagaaaagctcaaggctcgcaagctacttaaactcgattcgtcttagactcggttcaagctcgactagaacatcaaacgagccaagcccgagctctcacaccgaggctcgcgaacctcactgagtcgagctcgaacggctcgacgagcccaactgatcacttacaattaaaaaagcacaccttgttactttgccacacgttacaagctcacggcaagtctgaacctatcttcatttaatttttcacaacagctagttttctccacgaagccaaccatccagcacattttccaacaaaaagttgcatggtagacttgtcagtaatagggtgcatctccaattctccatcggtgcagtgcattgttgcatcatctttcccataagagcaagtttaatagtatagtctactactagctccaaatcatctatagccaatgtaatagccaattcatacaataattgcttactatactattaatatatggtcccatctgtcatatacacattacgtcttggagtccatgctgcagctagctacagatctgtagtccgctgctcttctctttcttcctttanctctttaaaatatgtttatagctagcttatagcctgctattgtacttgctataaagcctgcaaggaaagtactagtagtactactacttcaagcagtcaagctcgctgctactaagtactaccacttcaaacagtcaagctcgcatgcctataatatagctatgccaatactccgagcttgtgaaaagctcaaagttcgaacgagccgaatacgagcctaacataaagatcgagacatgatgaggctcggttcaagtctattccaaactcgagcctagataagcaggctcgctcgagctcggctcgttgacaaccctactagggtgttctggtccaacttgccctcaacacgccccattgccatccctaaaggttggtgaaattaatgatgataggtggcataccataaggtagagggttggtaaaattaatgctgccaggtggtatatcatatagtggagggttggtgaaattaatgatgacaggtggcatacaaccagtgatgggttgtatggtgcaattaatggtgacaggtggcatacaagttagtggagggttgcatggtgaaattaatgatgacatgtgtcatatcatctagtggagggttatatggtgaaattaatgataacaggtggcatatcatatagtggagggttcgtggcattaatgttgataggtggcataccatatagtggaggactggtgacatttgtgctgattggaccagctaatggtgggttgtatggtgaaatgaatattgacaggtggcatattagtcagtggtgtgttatatggtgaaattaataatgacaggtggcataccagttagtggagggttgcagggtaaaattaatggtgacagatgtcatgctagctagtggaccattgcattcattttcttggcttggattgaggtagcaaagaccttgtgtttatcaagttcaaggctataaatcactcccttctcatcataacaactacacatacagaaaacatcttggctagcaatttccatggagaaaatccaagtgaccacaccc

SEQ ID NO: 725 - DNA, 2000 bp, Oryza sativa
  misc_feature (331)..(332): n = any nucleotide
  misc_feature (866)..(866): n = any nucleotide
  misc_feature (909)..(909): n = any nucleotide
  misc_feature (1001)..(1001): n = any nucleotide
  misc_feature (1007)..(1007): n = any nucleotide
  misc_feature (1011)..(1013): n = any nucleotide
  misc_feature (1022)..(1024): n = any nucleotide
  misc_feature (1175)..(1202): n = any nucleotide
  misc_feature (1226)..(1226): n = any nucleotide
  misc_feature (1375)..(1382): n = any nucleotide
  misc_feature (1489)..(1489): n = any nucleotide
  misc_feature (1492)..(1492): n = any nucleotide
  misc_feature (1495)..(1495): n = any nucleotide
  misc_feature (1498)..(1498): n = any nucleotide
  misc_feature (1667)..(1686): n = any nucleotide
atatggatccattgcctgatcagagcctgcttcctgtctcgggcaaacctaccacaaaccctgtcacacaattcgaaccaagtagcaccagccaattgagacctaacagactgaagccagaaagctgcattcccacaaaagttcagggtagcaatcttgacccaattttgaggatgtataccatagatatcaaaatacacttcacagttagatttccacagttggggattgtcgccattgaactgaggacaggacatgggaggaatgctacctgcaatacctcctcccagaccactatttccagactggaaggtcaacccatcctgaattnngttggtcaggggatgcaaactcaggatcgcgttgccccttgatgaacggggtgctatggtagttcagctcttccttgggcaaaaccgctgtagtcacctttcctgcaaactcatccccactcggctgtcgctggatgctactctccaactgctggactttatgattcaaagtggcgagatcagagctgaggatctctacctttttctccactgctggaagacgaacttcgagagatttcttgagatcggcgaagtccgtgcgcgtgcgcccatcaacctcctccctcttcttctcattctcctccatggtccgcaatagcaggtcaagcttgccctcctgtgccatcagctgcgccgcctgcttcattacgtacctcggcttctccaaataatccggcttctccagggttctcgcccaaattcgccacactccgagctcagctaacctggggaaggcaagttgccttttcgcggggtctgatccgaagaacagccccaatccctcccccggaatttcacagccaagccaagagnattgggggcgaaattttaggctctgataccaattttgttagcnactcctaacaaagacacaagaacagttggacacgagtggatacgagaacacgatagataggtttcctctcgatccgacaggatcaagcgcgncgctcncctnnncctccgccnnngttctcagttcatacctttcgccatcgttctcctctgtttaatacaatctcccacaacccgtgacagctgtcacagcacacgcaactcacacacgccatcgcacaggatggattactcacttggcccacatcggcccattaacacgaacannnnnnnnnnnnnnnnnnnnnnnnnnnnccaggtcctttcctgattcacctncctgctgtagctcgtcatcttctttgtcaactcccagtgcaactgcagacttgtcagaccttcccgatgtagttatgccgcttggttgggatggtctgacactaattcatcatacggagcacacatgtcagcggcatctctctttctcnnnnnnnncctctgccacgcccttgactcgcgatagctccccttcctcgtgccctgtcaccgctaatatcaccatcgcggcctacccagccctttccacacccgacttttacccntcnccnccnggggggggggtccggatgggatggcttgatcttgagcatgcagaatggcgacgaaagagagatgtggctaacatgtgagtctacatgttaactcagttggttggaccagatcaacaagccacgttaataaaccaccattgtcaatacttctcaagagttaaattatacnnnnnnnnnnnnnnnnnnnntcgagatatctggtattgcgattgagtgatacgaattggattagacctataattgagagaattaaagtggacttattcgttcattcaaacagggaaaaaggcccatctatctatatgggctcaagggtataactgagccatctaatcgggctagtttacattgtcctttcactaattggacgtgcccaacttctctctcaaaggcattaaggcccatgtgcgacatcctctgagaaatcccataaattctggcccctgtatcccaggaaccaatctttggatcagcttgagattcattctcgagaattgtcaac

SEQ ID NO: 726 - DNA, 2000 bp, Oryza sativa
ccttggtcaactggctgcctgctcctctaaatgttttttttaaaaggatgaactagcatggtgatccgcgcagattacacggctagcatcattatattttctttcatataatagtataaatgttttctcattgtattattaaaatatattaaaatgataacgtaattttaaattttgtactaactttacgaaactactaatgtgtaatattcatattatattttatatgcattttatatgcatgttagttattaattattttaatatcaaattttagttatatctaaattatattcctatatggactatagactcgcctttcaatatttcttttttttattccgaattttcgttatgtgtacattgtatttctatatagactctaggctcttctttcaatattatctatttttaattctaaatttttattatttctaattatatttctatctggactctaaactcatctttcaatattctttaatttttaatttcgaatctcagttacttctaaattctattcctatattaactttagactcttctttctatgtttttttttaatttcgaattttagttatttgtaaattgtaatataaactctaagctctacttttaattttattatgtttattccgaattttaattagttttaaattcctatataaactctgtactctacttctaatattctttatttttaattccgaatttctattatttcttaattgtattatatatggactctatactctacttctattgtactaactttacgaaactactaatgtgtaatatttatattgtattttatatacgtgttagttattaattattttaatatcaaattttagttatttctaaattatattcctatatggacctagactcgtctttcaatactttttttttaattccaaatttttagtattttttattccgaattttcgttatgtgtacattggtatatctatataaactctaggctcttcttctaattttatttatttttaattttggaatttttattatttctaattatatttctatgtggactctaaactcatctttcaatattctttaatttttaatttcgaatttcagttagttctaaattctatttctatattaactttagattcttctttctatgttttttttaatttcgaattttaattatttgtaaattgtattatttttatatgaactctaagctctacttttaatttttttatgtttattccaaattttaaatagttttaaattcctatatagacactgtactctacttctaatgttccttattttttttccgagtttctattatttattaattgtatttctatttggactctatactctacttctaatattcgttatttttaactctgaatttctattatttcttagttgtatttctatatggactgtagtctcctcttccaatattccttattttttaattccgaatttcaactatttccaatttgtatttctatatatatggactctgtttttcttcttctccgattaatatgagaatttctagaccgtgagagcgagcgtggaggctcttttttctattcttttaataagttaatagatgattgaatagctgaattttttgtgataagtattcaatggtacaaagaatgaattcaaaattcaatgcaacaatatgcttcaaacaaccttggtcaactggctgcccgctcctacatccacatgcatgcttcacactgccacctagattaattacttcctcacgaagcaccaagtcttagtcgatcaccaaatcatttgcacgaatatgccttctcccattccttttctagtaaattcacatcaattttaataatcaataatcatccaaacattagtgaaagtagtactatatatatatatgtgtacaaacattacttctgcccaaccacggttagccacatagtagtaattaatcagctagtcagcttacacttgtctacacgcggcgagcggcc

SEQ ID NO: 727 - DNA, 2020 bp, Oryza sativa
catgacaggaggatcgggggagcaccctcaacattcaccacgtacgaggggcatcatacaacattttgagcgccaagtgagggagcatgctgaaggccttgatgaggatgttagggtcgccaatgatcgccttggtcaattggaggctgctcaaattgacaccaactccaagctttcctcattggagaggtcccttgtggctgtgaacacttctcttgcaggtatcttgaatacgttggagagaatgggccaagatggtcatgatggatcggctaggcacaaccacaatggccatgatgctaatagcagcatcgcagcaagggaagaactggagtacgctactgacaccgagcatgatgaggaggtacttggtcatccacaatgacaacagcgccggcagcgccatggcatggcgctccaccacggcgggaggtacgtgataatgatgattctttaggcaagatcaagtttaccattccttgctttgatggaaaatatgaccctgatgcatatcttacttgggagttagccattgatcagaaatttgcttgccatgattttcctgagaataaacgtgttagggctgctactagtgagttcactgattttgcatccatttggtggagtgaatttgtttgttccaatccaaataacactccccaaacctgggatgcaatgaaaagagtcatgcgagctagatttgttccttcatatcatgcacgtgatttgctgcacaaattgcaacaacttagacagggaaacaaatatgtagaggagtattatcaagctttgcaaacaggaatgctttgttgtggtttggtagaaaatgatgatgctggtatggctagatccatgggtgggctaaaccgagaaattcaggacattctagcctacaaagaatataattcaattaatcgtttgtttcatcttgcttgtaaagctgaaaagggaagtacagggacgaagagctagcttcaggactaacatttctgcaggtcgtgctagctcttggacaccttccaacgctgctgcaccgtcaactcgagcagcagcaccatcgtcctcaagcaacaagctgcgttcctctacaacaaactctacaccatgcccgagtgaaccaacaagaggggttgctgctacaccttccaagagctcatcatcagtagcatcatcaggaaggacaagagatattcagtgcctacgctgcaagggctatggtcacatgcgcaaggactgcccaagcactcgtgtaatgatcgtgagagctgatggtgggtactcctccgctagtgatttagatgaagaaacctatgctttgcttgcaactaacaacgcaggggaaggtgacgcgccccaccaagatgaggaaaacattggggctgaagctgcagagcactatgagagcctcgtggtgcagcgagtgctaagcgcacaaatggaaagggctgaacagaatcagcgccacaccttgtttcaaaccaagtgtgtgatcaaggaacgctcttgccgcgtgatcatagatggaggaagctgcaataatttggctagtgctgaaatggtggagaaacttgcattgagcacatagccacatccgcagccctactatattcaatggcttaatagcagcggcaaggtaaaggtaacacgattggtaagagtacattttgccattggttcttatcatgattcaatcaactgtgatgttgtgcctatgcaagcatgttctatgttattaggtaggccatggcagtttgataaagattctttacactttggcaaatccaatcaatactcctttgtgcataatggaaaaaaaacttgtgttacatcctatgtctcctgaagttattttaaaggatgaacatgctagagctagcaaacaaaaaaatcaggagcatactaggagtgagcatcttattgcggctaatgaacttgagaagcataagaagaaactcaccaactctattcaaaataataaaaatgagattaagctgaagggatcttgtttcagatttggatg

SEQ ID NO: 728 - DNA, 1999 bp, Oryza sativa
  misc_feature (180)..(180): n = any nucleotide
  misc_feature (279)..(279): n = any nucleotide
  misc_feature (445)..(445): n = any nucleotide
  misc_feature (596)..(630): n = any nucleotide
  misc_feature (1110)..(1112): n = any nucleotide
  misc_feature (1129)..(1131): n = any nucleotide
  misc_feature (1385)..(1399): n = any nucleotide
  misc_feature (1424)..(1426): n = any nucleotide
  misc_feature (1434)..(1436): n = any nucleotide
  misc_feature (1446)..(1451): n = any nucleotide
  misc_feature (1464)..(1466): n = any nucleotide
  misc_feature (1520)..(1520): n = any nucleotide
  misc_feature (1532)..(1532): n = any nucleotide
  misc_feature (1544)..(1559): n = any nucleotide
  misc_feature (1603)..(1605): n = any nucleotide
  misc_feature (1913)..(1913): n = any nucleotide
tatttttagaagtgtgtaattcatacatacctccaattagctacaaacaaaaggtctaaaaggataatagtctaataaattaaatcaccaagcaattcaagatttatcgtgcttatgattccatgggtagctcactttctcacagcagttccataactaactgtcacaccctaacatatngtcacgccccgaactagccccgaacggaactagcccgtgacgctctaaattaacctgttaatcgataccagtcccataaaacagtgctgatatcacagnaagacagaatatcacagcaacagaggtctctttattacagagtaggactacagtcatgttgggctgcggacagatcccgagctcacaactgcattacaaaagggaaagcggaagccatgacttggaccaatcatcacaggcgcgacttgggaactggaccgaaacngtaacgctccgcttttcgtgagtcgttaaaaactaattcagcaaaaatcctaattgcgaaaattttcgttctttgtgtgcgagtctaagttgtgccaagatctcaattcaaatccgtccttgatccctctcgtcaccatcaaaaattgccnnnnnnnnnnnnnnnnnnnnnnnnnnnnnnnnnnntcaaactctgaaattctatccctctctttgaatcatcgccaaatacttccccagatccaaaatatccaaaaccccatcttgaatcctccgtctactccttcctctcatcgagatcccaattccaaaatctaagtcaaattccaagttcaaattctcttcgaatcaatttcctcgaaaaaagtctactttacctccctcggttattgtgggccgtttttttttctttttcctcggcccatctctctccctcagccgctccttcctccctcgcgagcgctcgctctctcgtcttctttctctctctctctctctctctctctctcgtcgaactcctctcctcggcgccgattcccgccgccgccgtttgaattcgccggtcgcccttcccgcgcacgcgctcgccgctcggttgccgccgccatcagcccttgcaccgccgacgccacgcgctgccgccttgcccccgctccattccaaacnnnccgccgccgtcatcgtnnncgtcatccatagcccccgccactccacgccgcacccgtccaagagtaggagaagcagctgctctccctctcctcctcctcctcactctccctctcctcattatggcaagggaccaagcccctttcccccttctttttccttttccccgaccaccgccggcgtcaccacctctgtgccgcttgaccgctcgcgccacctgcctcatctccttgaccgccccaatgtcggttctctcaaaccgacatcgccacctnnnnnnnnnnnnnnncctcccatacctcccgcttcctctnnnccctcacnnnactgccgccnnnnnnttcgttgtcgttnnngccctcctctgccgtcgtgcgtgtcggagagctagcgagcacgaggagtcgacnaggagctccgcnccgccccatccnnnnnnnnnnnnnnnncttcttccccggccgcgccctctcggtgccgcgccgccccgccnnngcgtccgcctcgccgcgactccatccgcgccgccgacaccgttctctcgtcggtgagctccccactgaaccccttttcccttgtcgcgcgccgcgccgcgcccgccgccgttcgtcacatctcgccgcgcgcccttgctctgtcctgggcgtcgctcgccgtcgccggcctctctcggcgtcgcccgtgccctctcgaccggtagaatgagctcgcgacctcgcgtagatgctcccgctccaacgaatcgaacccccgttgccccggtgaagttttcccctttgctcgccgccgacgatcgccgtcgnaatccgccgctgtcggctcccctcttgtcaaatccctctcgccaccacgctcacgggaatccccttgatctcccccttgttgcccc

SEQ ID NO: 729 - DNA, 2000 bp, Oryza sativa
tactttctaacatgtaataaattacttttaaattaaataaaatgagaatatattcaatatgaatatcgttttgtcacatattttgagtggagtacaatgatgcaaatatatcttaaaaacaatatgtgatttaaaagacataagttattaaaaagattaaaaaagatacatactattggagtacaaaccagcagtcacgtccaatgaaaaaaggtatgcattaaagttacttttctttttgttataagttacttctataatatatgtaaattacttttaagctttatttaatttacttttacatgtcgaagaagtaatttagtgaaatctaaaagtaatttagatatattataaaagtaatttataatttttcatcaaaatataatcatgtgagatcttgttataaagatttagttgttacgaacacaacggtgtaatcagatcgtagatcggatgagtagtttaagagaaaattttatttgaagtataggtggatagagtctctcatagatggagtggtagctggtttagacaaaccagctatcactagctgtgtagtcacgtccttaaaaaaaagtactccctccgatttatattgtaagtcgtttgacttttattctagtcaaacatctttaaattgactaaatttatagaaaaatacactgatactttcaatataaaacaaatatattatcaaaatatatttaatgttgaatttaataaacttatttagtgttttaaatattgccattgtttctataaacttagtcaaatctaaaaaacattgactaagaaaaaagtcaaacgaaacagaagcaatatatttttgttttctcattttactaaaccatcgttgaagggttcgaggtgtatggtagaacagtttattcttcccttatgcttcactattctctctcaatggggcggagacaggagtaggacggctagggctgcagctctattactgagtctaaatatccattagaattgtactttaaaactttaaaaagtagaatattaaaggaaaagctatgtaaattatattagctgagctctagatttagaagaatcctatttccgctgccgactctcattgatctgcacggtaatatacatgacatggttagaattgaacaaccaaaattgagagcactagctagtactaggagtacacgttttgagtgcgtgttatatcaatgtaaatataacattttagttaaagaaagtgtaaatataacattatgaataattgtttatatatcggatcaaggacgattaattgtaaactggttgagctaggaagaaatgcattaatattgagcaggtttttcaaacaatatatgcattccttgagtgaatatataccctctacagttcagaattaggtagcattatcagcttgtgccgttagtactaagttgttatgtctagatcaggtttaagctgcgatttctcttggtgcaaatacatgtttaatcaggtatatacagaggtttctattagcatatacatgaaatagtatgtcaaatatgatgatggtacggtggcgataacggaaggacatcgatcgacaagtgcagtaatctgatgaacaagatgaatgcatgcattgatcgattaactggaatgtacatcacgggacatcttgtagagaaaggatatgtctgatctttcggctgcgagatgaactgaggtacagcaattggtgttccttaatttcctgatgcctcccattccgatcccttcccctctcctcccatcgatcgatctccacacatttttattcttttttttaattagacggcactataagtataattataatatagaggaattgaaggccatatatacatgcataagagggacaattgatgatactatatagaggccgaggagcattatattggtaggttgtttcattaattatatttgagtaaatttatatttttgacaaagtttcaccaatggacaagggccaaagcaacattttcagagagaaa

SEQ ID NO: 730 - DNA, 1999 bp, Oryza sativa; identical to SEQ ID NO: 722
  misc_feature (103)..(103): r = adenine or guanine
  misc_feature (132)..(132): y = cytosine or thymine
  misc_feature (174)..(174): r = adenine or guanine
  misc_feature (222)..(222): y = cytosine or thymine
  misc_feature (827)..(827): n = any nucleotide
  misc_feature (841)..(842): n = any nucleotide
  misc_feature (1647)..(1647): n = any nucleotide
  misc_feature (1671)..(1671): n = any nucleotide
  misc_feature (1679)..(1679): n = any nucleotide
  misc_feature (1715)..(1715): n = any nucleotide
  misc_feature (1775)..(1775): n = any nucleotide
  misc_feature (1792)..(1792): n = any nucleotide

SEQ ID NO: 731 - DNA, 2000 bp, Oryza sativa
  misc_feature (885)..(886): n = any nucleotide
  misc_feature (1186)..(1186): s = guanine or cytosine
  misc_feature (1194)..(1194): n = any nucleotide
  misc_feature (1603)..(1604): n = any nucleotide
  misc_feature (1740)..(1740): n = any nucleotide
  misc_feature (1742)..(1742): n = any nucleotide
  misc_feature (1877)..(1882): n = any nucleotide
  misc_feature (1890)..(1890): n = any nucleotide
  misc_feature (1897)..(1897): n = any nucleotide
  misc_feature (1901)..(1901): n = any nucleotide
  misc_feature (1913)..(1913): n = any nucleotide
gcgccggtggggagaagtgcggagggcgccagccatcgggcggggagggtaggccgacgtgcgcatgacaggagaggaaggagaggcggctagagctgcacgacctcggccccgccgccgacgaagacttctgctgcgctgccgcattgatctgcacgagttgcaatcttcatctacagccttgccttcaggccagttaggatttaccatcacagcatagacatatgacaccaccacaaccctcccaagtcccaaccttgcttgtgaacaagccttccgcacattcgtcgtgcccgttacagcagcagcaagtgtatgaacctacagcaacatcaattcatttagctacaagaacatgacgatttaattacaactctgcagacttcagctactactagttgttgagaaagcaacagtttcgacaaatcatttttagtagaaactgttgatttttgtcgattttcaataactgcagtctacagtttgaaccagtcaatggagaagaaaaggaattattttgctgaaaaaagagagatgtgtgcccctgggttagcggcggagaggagcacggggcaggccacatggaagacgtcgtcgcagccggcgatggccgccgccacgctaccgtagtcgagcaggtcggccttgaacagccgcagcctctccacggcgacgtccagagacatcaggtgggcgttcttcgcgtcgccttcgcacaaatcatccgcacaagcacaccaatcaatcaatccaccagaacaagagcagaacgccatgaatatcaaaaactttgacgcatatggaggggattggggaagtgggcagcggcggctgcgactgcgagctcgagtcccgggccccgttagcgccacgctgaaccgtgtnncgcggctgtgagctcgccgtcgccgcaactcgtgcagatcgatgcggcggcgccggaggagggggggcgaggtcgtgcaagctccggccgccgctctctcgcctgccgccgcgcgctcgccggcctacccgttccgctcgttggcctccccgcctactccctctctacgcacgctcgccggcctccctacccgatggctggcgcccttctccctctccgcgcgcgctcgccggccggctagggagctcgaggaaggatgaagaatggccgggagggagaagggacaaggacgacggggcsggggaganagagagcagggtgggtcccactatttttaatgactgacatgtgggtccgaccttttattttgcttccaagtgccacatcaccgccacatacgatgaggactaagtcaaactagccacatcagcgccacatcagtcaaaaccgccatctaaaccgctgagggacctcatctacatcggttttgacagttgagggacccatggtatctggtattatgattcagggacgaaaatcggactcggtgtaaagttaagggacctcatatgaacttattccaactccgactcgccgacgtccaccggcgaacgcacgcacggcccacgccgcggacgcagagcccaccccgaacccaacaccaacaccaccactccttctcgaaccttccactcccacgcttcttagcctaagccnntagcctaagcgccctagcctagcctagccaacccccttccttcctcctctcctcgcggctcgacgcgagacccagccacccgccgccggctgcgtctcccttcttctcacccaccgtcgcggcggcggagcgaggngnacgaggcgggggacagcacaaggcaggcaagattcgagaggccggcggagccaagcggagggcgccagcctcgtcgtcgtcgtcttcttccgccgcgcggcccggccgctgccggcgcagggaggcgcccccgcnnnnnncgccgcgncgtaacngcancgcctccgcggnggaaatggggtcgactactacaaggtcctcggcgtcgaccgcggcgccggggacgacgacctcaagaaggcctaccacaagctcgcc

SEQ ID NO: 732 - DNA, 2010 bp, Oryza sativa
gaaacgtaacatctaattattttttgggattactgtagcaattagtctcgtgcattcaaatttaatccaatgactataagagcacccacaatgatgataaagtaaggtgctctctataaaacatgtacatctcagtaatagactaaattaatagtaaaccacctcaatagtatgtctacatgggtatctatagctctctaatccattgcctcgtttttctatatagactatctccaggttagtagatagctttgctctctctcttcatttaatctcttccaagtagaaaaatatgatgacatgaatctctcatagagagcctatagataatcattacgggtgccctaaggctgtgtttggaggagagggttgggaacccctcttacccggcacgcaaaacgaaattcgttttattgcatgattaattaactattaattttttttttgaaaattggattaatatgattttttaaacaactttcatattgaaagttttttataaattacactgtttagcaatttgaaaagcgtgcgtacggaaaacgagataggtgggttgggaaaatggggggaagaacacagcctaagagcaagtttaatagtatagcccactactagctccaatcatctatagccaatctagtagataattcatataataattgtttactatactatttatactattaatgcatggtcctacctgtcatacacacattgcgttttggagtccacgctacagctgactatagatttgtagcccgctgcttttctctctcatattttatctcattaagatatatttatagctgactaatagtctgctattgtaccggctctaaataactaatggcatggattactgtagttctctacctttgcagttggaacggcggaggatactatccccggaggaagaaagtcgctgtacgacgatggatgatgcacggatcggcgagacgacgaccgggaccgtgcagacgagttagcggcgcgagacggcgagaggggtggtgggggtgaccttctagataggcaaaatatgacatgcgtgagggctgtgcattgttagctagcaaagtcttctagatcgtcaatgcgattaaagcgtgcaggtgacagcaaccttgacttaattggcgataccccgcggggccctcctagctaagccgatgcttccacgatgattccgtgattccgtctaagggagcaacttaggctgagtttagttccaaactttttttttcaaacttttaacttttttatcacattaaaatttttctatatataaactttcaatttttccgtcacatcgtttcaatttcaaccgaacttttaattttaacgtgaactaaacacaccattagcaaaataaagcttccctgttccgaaacatgacggcttctgaccgtcaaacgaatcgtcctagtcttcgactacaagtagatgccttgcccttgaatcccagccacgccagcatcggcatcagcttgtgcaaacttttcaacgatgagatgagcagcacgactgcacaagcatatgagacgagatagtgaggacctttttcctttttttccacgagggaatatgagagagcgagacctcgaagggtcgtacttgcaatttcgcgtttatatgggccgtagtaggctcatacacgtccagcccatctgcgaccagttcggccattcagttacggattaagttcaccagccgtccctcaactttatgtcgacttggtataacatccctaaacctcaaaccagaaatcttcacccttaaataatacaaaaccgtgcaatttcgacctcatggcagtatagacctctggtttcgctgatgtggtatcatagtaagcaaaataaaaaataaaaaaatatgagacccacatgtaagtctcttctttcttctctattcttctctccgatattctcttttcttcttctctactattttcttcagagaagggatagatggatatcggggaaatgagggaggggagaggcgcgg

SEQ ID NO: 733 - DNA, 1999 bp, Oryza sativa
  misc_feature (1730)..(1730): n = any nucleotide
caaacgtgcaaacaagatgtctaagagtttccttgcttttagttaagtcgtgattttgtgactttgtaactcgtactccctccgtctcaacgaatttggacaaaggcttagtacaggttcattgtactagaaggggatgtaaccccctccgtcttaacgaatctggacaaaggctttgtacaggttcattgtactaggaggggaggggtcacatcccctcctaagagcaaggctaatactttagccggctgctggctgaatactactaccatgtcatctatagccatcactagccacactagtccagtgactatcgcttcctgaatagggcacttctagatgtatatatgtttgagatatatgattctgatttttgtgtatacatgtctgagcaggggagtggattctcacgcacctggtggtttacttaaatttttgaggaaaaccacaccaagaactgaacaacatgtgtgcaatgggagttcatcgcagccaatcaacgttggcgacgactgcaatgttggcgattgcgttaggactgaaaaacgcttgccatggacaaaagaggaggatcttagattggtaagttattttttggggggttaattatgatgtccatgtgttatattaatagaactgcaataaacatcttttgataaatattttaggtcagtgcttggttgaataattcaaatgatccaatccaatcaaattacaagaagaatgaccaatattggaatggtgttgctgccgtctacaacaacaccaccccaaaaaacagggctaggcaggtcaagcaagtcaaggatcggtttggaagaattaaaaaaagggttgcatggttttgtgctagctggaaggaggctaatgctttgtgggctagtggtgaatctgaagtgaatttgatggacaggacagtgaaaagttatgaagaagatcacaaaaaggatggtccatttatgtttaagcattgttgggatgtgcttagcaaggaaccaaaatgggacgcctatttggaacgtttagaaggtttggagccagacaagagaaagttcaatgttgaggagggtgtggggcatcatttctctctagatgatgctagagatgaacgaccaatagggggcaagcaagctaaggagcagcagaaacgaaaaagaaaggaccaggctattatagatcttgaagaggaattccacaagcttgtagatgctcagaatacagcaaatgagggccacaaagagatgctagagacacagaggcgtgtgtctagtgagaatgttgaagctcgaaagcttaagtaccttgcagaaaaggaacacaaggaatcaaccatactagaaacatacaaatcgttgatgatgcaagatacaactgggatgcctgaagatgtgagatctgagcgcatgctggcattgaggtgtttcagggagaagttatttggcaaaactgactaaggtattatcttgctaaaactttacattcttgtttactataatatagttattttcttaactttatcatgctgaaactttgcattgtcctctactataatatagtcactttctgaactttatcctgctaaaacttatttatttatgcaagttatagttattatgcattgttatctggtgaaatacttatggtgctataagttatagttactatgcattgttatctggtgaaatacttatggtgctgcattaaattgttccttgctgaaatttctggcngaatacaagttcaacatgttctctattgcattaatctagtcaacagcatgcagtgcaaaaaatcatgcagtcaatagtccaattcacttaacaacaatgcatttcagataaccatgcagcaataaatatacacacctacatataaccagaacaagatacatctataaaatgctttatcctaccttcatattcatccacccacacccatattccttctcttgcatatcatcttcctactcagcctaccaatcccatctttctctcccact

SEQ ID NO: 734 - DNA, 1999 bp, Oryza sativa
ttaaatcatatataaactttacatgtgaaaagtttacctgtgtaaagtttacatataaaatgttactgaaaattactatgtaaataaagttagtatatgtaaactttatacgaataaagttacatgtataaaatagaattgtttatggtagattttagtctaaatgagaaaagaaaaggccaggatatgcttcagctagctagtgggcccaggatgattttgcatatacataacataaggctatagagagacttgtgagtaagagcaggacacgcacgaaagaaataggcagcgtcttccccttccctttgtggcgtaaaagaaaagaaaatctcccgtctcttcgtctcctccgctccttgcgccgccaagaagacgagtcgggggcggcgatctccatctggcgagcagagcaggggaggggaggggatcctggtgagcctctttctgattcatctctctctctctcccatcgggactggaatttgcttgcgttcgttcgttcgttaaccctagcttctattctagatctggaagaagctcttcccttaatttcagagccttaaccttaatacaagtaacagtttgtttgttccccgaaatgtttgtgaacccccatgtcccaagttggatccgccccctggtttggaacaccttgcacttttcaatttccggtgatttgtctgtaactgtgtactaggatagtctcttagtaatctatccatgtcaaaaatccttggttgttacgaagaaagaaccattctggaagatgctatgcaattcatttcctaattcttattgcttttgtatctgtactacctgaccttatttcttagtttctttatacctagcttatattctctatctgaaaaatgtaactagtattgtgggtacaccaactgtaatttaccctcttccttatttatcgagaaatcttccttcttatcaatcttttattgccctatcttggattcttttcggtttagtttgtttctaatttcatgttagtaacggatatgaaatgtgggagaatgccaaattttagtgggccttttagattacacgctttctgtttcgtttatgcatatatttattctatttattgtaatttgatatgttcagtgaaaagttgaaaactttgacgcaaaatgaccttattctgattctttaatgcactgttttccttcatagtataacttagtggccactgaaagaaatactgtggatgaatgcctattgatagtgtaacctatatgctatctgcttttcctcgtcaaatggagatgaccgaacaccaatttgtcttagaggatatatatggaacatgagtgaaaatccattgagttttaaagaagtacaatgccacttcatcaacttttgtacataatcaattggctaatcttttcccctgatgccatgttgttgtttgtcatcatatattgcattcacagtcagaaatttgaagaacatattagatgcatattaagtgtcatggttgatattggctttcatgtttactggaataaaatcccttctatccttaggcattataacttacttccaaataaaataaactacttttggtaaaaatatattttggaagagacctcccacatatatattgctacctctactgtgggctaggtagacaatcatgagactggatgcatcatgttcagttctttgtggcaaaatccgtaatatagaagatatacaatgtgatgaaccttcacgctcaccttcagccacttttagggtggttgccttaattgtttgttatgtgttggtttcaagtttgagtgctgcttttgtttgcatcatatcatttttcattgagtatcagtttgaatgatatctttaagatgaaactctgatcatttatttgaaaatcctggcagtttttcatgtacggtaatcataacttcatatattgattatttttcaggctcagtcttgcgactttcttgctgtataatgagatcatatctttgagtgctca

SEQ ID NO: 735 - DNA, 1999 bp, Oryza sativa
  misc_feature (693)..(693): n = any nucleotide
  misc_feature (699)..(699): n = any nucleotide
  misc_feature (759)..(759): n = any nucleotide
  misc_feature (799)..(799): r = adenine or guanine
  misc_feature (845)..(845): n = any nucleotide
  misc_feature (863)..(863): n = any nucleotide
  misc_feature (1395)..(1414): n = any nucleotide
  misc_feature (1437)..(1437): n = any nucleotide
  misc_feature (1460)..(1460): n = any nucleotide
  misc_feature (1513)..(1513): n = any nucleotide
  misc_feature (1515)..(1515): n = any nucleotide
  misc_feature (1520)..(1520): n = any nucleotide
  misc_feature (1534)..(1535): n = any nucleotide
  misc_feature (1542)..(1543): n = any nucleotide
  misc_feature (1547)..(1547): n = any nucleotide
  misc_feature (1552)..(1553): n = any nucleotide
  misc_feature (1556)..(1556): n = any nucleotide
  misc_feature (1571)..(1571): n = any nucleotide
  misc_feature (1580)..(1580): n = any nucleotide
  misc_feature (1583)..(1583): n = any nucleotide
  misc_feature (1634)..(1697): n = any nucleotide
tttgtagtgcctagatcgctagctagctcgtgcgaaacgaccgaatagacacatatgatgcactaactaacaaaagcacatgcagaaagtagattttaagatctaaggaagatgggttttttatccatcgaggagacatctcttaccatctaaatagtcatatttttttaaaaaaaattgataagataaattaatatgagacatatcactttacaatatatgcaagatcaaatttgacttctacgagttgtaaaaaataataaattaaactgaaatcagttgatgtgaatccacaattttatttgatatttttgttataatttatagaaattaaatttgaacttacatgtttgtgtattgagaaaatgagattatcaaaaaatataaacttgaagtgcatgaaaatatatgctttcccagcttgaaaatatatatttgatctatcttatgaaaaatgagattatcctctctagggatgaaaatatatacttcatccgtttcatattataagacattttagcattgctcacattcatatatgtgttaatgaatctagacatatatatatgtctagatttattaacatctatataaatgtgaacaatgctcgaaagtcttataatatgaaatagagggagtactttcccagcttgaagtgcatgtgcaagaatattttttaaaatccaaacagcnaattcnactctgtacataaaatacacttctctggtctagataatttgctactctttccggccggtntaaaagaatctattatatctataaagtaatagaaaaaagrgcccccacgttcgctcttacggcctagaaattcccacattaatccnaaaaaataataaaaaatnaaaatagaagattagttaaaaactgaagaaagaaaaaaaaaagaaactctgaatcggacaaccggtaaaaaaagaaggaaaacctaatcatactacacactggaaactgaataaagaaaaaaaagacattaagaaacttgaatcggacaatcggtaaaaaaaaggaaaacctaaacatactctacacgggaaaaactggaaacggacaatgttttggggatgcggaaaaaatagaaatagattaggattagttaaaaactgaagaaagaaaaaaaggcatattaagaaatatctatctattaacttattaaaggaatagaaaaaggagcctccacgttcgctctcacggcctagaaattcccacattaatcagagaaaaagaaaaacatagtccatatagaaatataatttagaaatagttgaaattcgtaattaaaaaataagaaatattggaagagaagactagagtccatatagaaatacaattgagaaacaatagaaattcggaattaaaaataaggaatattacaannnnnnnnnnnnnnnnnnnnagaaatacaattaagaaataatngaaattcggaattaaaataaggnatattagaagtagagtatatagtccatatagaaatacaattaagaaataatananattcngaattaaaaataannaatattnnaagnagagnntanagtccatataggaanataatttanaantaactaaaatttaatattaaaaataattaataactaacatgtatataaaannnnnnnnnnnnnnnnnnnnnnnnnnnnnnnnnnnnnnnnnnnnnnnnnnnnnnnnnnnnnnnnaaaataatgttttcattttaatatatttgaataatacattgagaaaacatatatgtaattatatgacagaaaatataataatgctagccgcgcaatctgcgtgggccactacgctagttaatataatatatgttaatttccacagtaattatatagtgctagtatattgtccagaacagaacatgaaattaatgtgcatatatatgaagagttggttttaccaaatcgatctggcctaataaaacaggggtgtacggtgcaatgcgcaggtttaccggctttctatcggtgccgcgtgtggg

SEQ ID NO: 736 - DNA, 2000 bp, Oryza sativa
  misc_feature (19)..(38): n = any nucleotide
  misc_feature (40)..(40): n = any nucleotide
  misc_feature (42)..(42): n = any nucleotide
  misc_feature (44)..(44): n = any nucleotide
  misc_feature (48)..(49): n = any nucleotide
  misc_feature (51)..(51): n = any nucleotide
  misc_feature (54)..(54): n = any nucleotide
  misc_feature (58)..(59): n = any nucleotide
  misc_feature (61)..(61): n = any nucleotide
  misc_feature (64)..(71): n = any nucleotide
  misc_feature (78)..(78): n = any nucleotide
  misc_feature (80)..(82): n = any nucleotide
  misc_feature (86)..(86): n = any nucleotide
  misc_feature (89)..(89): n = any nucleotide
  misc_feature (91)..(91): n = any nucleotide
  misc_feature (94)..(96): n = any nucleotide
  misc_feature (103)..(105): n = any nucleotide
  misc_feature (113)..(113): n = any nucleotide
  misc_feature (116)..(116): n = any nucleotide
  misc_feature (138)..(138): n = any nucleotide
  misc_feature (140)..(141): n = any nucleotide
  misc_feature (149)..(149): n = any nucleotide
  misc_feature (151)..(154): n = any nucleotide
  misc_feature (157)..(157): n = any nucleotide
  misc_feature (159)..(159): n = any nucleotide
  misc_feature (239)..(241): n = any nucleotide
  misc_feature (243)..(244): n = any nucleotide
  misc_feature (246)..(246): n = any nucleotide
  misc_feature (248)..(248): n = any nucleotide
  misc_feature (251)..(251): y = cytosine or thymine
  misc_feature (254)..(255): n = any nucleotide
  misc_feature (263)..(263): n = any nucleotide
  misc_feature (284)..(284): y = cytosine or thymine
  misc_feature (414)..(414): y = cytosine or thymine
ccgcggcgcttggcctccnnnnnnnnnnnnnnnnnnnngncncntcgnngngcnggtnnancgnnnnnnnnacggcgncnnngccnccnangannngccgcgnnnccacctcnggntcgcgctcgccgcgggcctccncnnactcccgncnnnngtngncgcgcagcacctcgcgccacgggacgccgcggtcgtcgggccactcgaacagccgcgtgacccggaggatgtcccggtannncnncngngcytcnngccgcganctcgtcagccggcggcgcgcytcggcgtccgccgcgtctccgtcgagcgccccggaagaggaggagggggacttcttggcgaggtggcggtcgagcagctcgtcgatggtgtcgggcccctcgtggatggatcggaccggcggccgccgcytcaacacggccacgccgcggaggagggaggaggaggcgcgtgctgcgacggccatggctgggttattcttcccctcgtcccgtctatttaccgttgcgttgctcctgagttgggtatttgggtgagatccccaattcttgacctggttgggtcggtatccagccgatgggcaccgtgccaccgtgctactagtatgtggcaaaccggagactggatttaccaagaaattgcgttgatttacaaagaaaccacaccataattctcatcggtttcatcatcccatagtactactacaatttatttatttgcaacaacggcgaaccaagatcacaatggaatacgttttacatgtcctacttgtaacaccgaacgctactacgatgttgatgtacaaggtttcatctcatctgtacggtgcggtagccggaggattgaccacggtgacggccttggtcttgatccggtacctcggccggcgagggatgacctggctggggcccatcccgaactggccggtgccgtccatggccggcggcccgtcgtcgtagacgtagccgaggaggcggccgcaggcgtcgcagctgatgcgggtgcgcttccgctggatcccccagtagttgagcgtctcgaagaaggggcggatcttgtcctccggcgcgaaccgcagccgcgactcgtccacccacgagaaggagagcgtccccttgttgccggcctcgaagtagaccccctccgggtatagctgcgccgccgtcaggttcaggtccgccccgcactccgcgcaccggtacgtcgccgccgccgccgatgaggacgccatcccgccgcgccacccgagcacggagatcttctgcgtggtcgcaacgatggatctgcgtagttcagtgtaattttgtccaatttagggacgatgatttctagggaggacacggcaccggaagcgaagccgcgttggactggaatttcttgctacgaccatgagaaggttcttctatggtgagaagtcaaagccaagacgccatgttttttcgagtttcgcaatggtttcacgacggaatacggtgcggcccattcaggtccagtttgttttggatcgcccggcccattagccgttgcttcctctctctccgttccgtgttctacgagatttgtctcaacaatcaatccgaattttggaagcagagttgttacgaattgtatcggcaaacacatatcatgtgtatcatgtgatcatcagagtatatacataacaagtaacaaaatctgcaggtttgcacgtctcgtgtgtagtacggcgataagctaatgggatatggatccaaaacacgcagagccatgcgattgcgatgcgagcccgtcaaaacttgttgctggaaaggagggagaaggcgttgcattctcccgagaaaaatgaaggatatgaactcggaatattctcgcgtcacccgcgtatacatagcaaccaaccacctgttccatctctctgtagctcactccctcgccgccatttacgaggcaggaaggtgtttgtgtgagagagagagagagagagagcctttgaccgccggagcagcagcgtcaccgcc

SEQ ID NO: 737 - DNA, 1999 bp, Oryza sativa
  misc_feature (132)..(132): n = any nucleotide
  misc_feature (1925)..(1925): n = any nucleotide
  misc_feature (1950)..(1950): n = any nucleotide
cacagcccaaaggacagacatggaatccggctggtaaccttgtttatcttacacgatattctgcggaacctggaaatgaaagccatttcataacagaactttttttaaaaaaaaaaaaactgtatgtttgcncaacattttgtttatacggttttttttcatgttttcctttctttttgttaggacatactttattcgtgttcaattactcactccctctcaaaatataagcatttttagctatgaatctggacaactatgtatccagatacatagccaaaagttgttatattttaggagcggaggtaatattactcaataacagtactagtgactgtaaaaacatgttactagtgagaagctagggatactaaattcatgaacgaatgaacagatggaaatataatcatacaatgatcatacattgaactaattaacaagcggtacatcatatcatcgatctgctatgcatccatcatgatcttgaactcctcaaagctgatgactccatctccatcgaggtcaaacctgcagatcattgtttggcactcctcgatgccctgatgcgatccgagcttgctcagcatccgtttcaagctcgccggagtgatgcgcccctccccttccatctcgtacatccggaacgcctccattagtcccctgcacctctcctcctcgtctcccatctcaagctgcaccgccagcttcgtgaactcctcctcgtcgagcagcccgtcgtcgtcggtgtccgccgacgagacgagcgcctcggcctcctcggcggacatgtcctcgccgagcgcggccttcatgcagagccgcagctccgccgccgagatcttgccgtcggcgtcgcggtcgaacgcggagaacactcgcctgaactcggctgtcgcggccaccatcttctccagttgcaacctaaaatgttcagaactgcaatgtactcgacacacgtagcctctgaatattggaaggagatgctgcaatgcaatacctctcgtgcttaactagttgtgtttatatatacaagatttcagcatgatttgttgatcagttcaagctaggcatggttggttactgaagactgacggaattagtcaatcgatagtgtcaattaataggaggcttccttgaacgattagtagcaatagtttatacgagcaacgccagccaattccaagagaaagggaaaaggacctcgtcgcgtgtgatcagtttctggcttgctgttgatactaaattattacttgtatattgtaatgtcccaagagtttgacgtgtggtgagtaatagcatcagccggccgcattgacgaggtcattttcgttagtttgttccattatgcttggtcttatcgatcatgtgtggaatccaacttttatggaagtaggtagagaatgttcgaatccacggtatgtacatgtgtcactatgtatgaaagttcttgcagtggatcatttcgttggaaggcctactggaagggatattatatgactgcatgctgttttgttttattttttttgacaaagataggacagaactctgttcaacattcatctgcatttttttttgttttgggtaaatcatgtacaattatttaaaagtgctgtcatctctccaagtcaaagaaagcttacttttttttttgacgcaaaagggtttacttgctattgtaattcccattgtttaatctgattgctgaacttgacctgatagcattcctagtgtgctcattcctcattgcctagatgttcaacaataaataccagagcttaagatgaactctcaaacaccaaccttcctagctaacaaacccaagtgtcaagtctcaataatcaatcctaatttgataatttgatctagttaagtgaaaggcgaacatggttgcctccgacgagttcaggcgcgtctttggatcgttngacccaggaacggcgacggcaaganttccgctatcgagctgcggctctgcgtgaaggcgtccctcggcgaggac

SEQ ID NO: 738 - DNA, 2000 bp, Oryza sativa
cttccacgcccactaatatacaacatctcattatgcaaatctcgatttggtcctatcttgtctatggaaactggatgtaccgtaatttctactagtagaatactagtagtacgtagtactgatctcatctgtatcgcctgtacgctgaagctcattggcctgcttagagcaggagttgcgaatgttttcttggtcagatgaatgctgtatgggtctaaaattactgttaccttgttctgaacctaagttaatgtcaatgatcgactgaatatacatgttagtctccttcaatttgggcacggtgtctgtcgtcctaggataaactaacctcgtatggaatatgacacatcctaattttgtgtttagattcatcgctctcgaatgtgtcatatttgatacaatggtggtttatttttggacggacgaagtaaggagaaaaatggcgcatcacatacttttgtttgatatatgacgttgggcaagcatattgcatgtttacttctagacttgtataaaatgtggacgtcaaggagagacctggtgccaaaaatttcaagaaaaaacaaattccaactaggtggaatagcgagtgcatttagtgaaaatggatcatgatgacaggattgctgatggttccagtggaaacctagcctagtgtttaactggctggtaatgattacaccttcagacttggtaaccctcttgggggtattgtttaactggctggtaatgattacaccttcagacttggtaaccctcttgggggtattgttgagatactcctcctccctctcttagcaaggatatctgggtaaaaaccttatccggtttttttaccggcaatagcattgtcttccagcgtcgtaatcttaatggaggcattattttcagagttcactctgtggtgctgctataggcccgacggtgactggactcacttagcggtgactggttcggtgctcggctcctctctcagtagcttgtatgtgtcagttggcacgtggttttaaggtgggtattttggtgcacttttttccttgaaagttggctgtcaatggaaaactctctcgtaacctttgtgtttttttttctatcttactaaccttcggatatataacctccttcggtcttaagaaaacgttcctgtgcagaacgttcagcttggttggtcgagagctgccaaatgttttaccattgcctgggttcgatcattggtaaaaataattctgaattgagatattttgcttctcttggttctctcttatgaaaacggaaaacccaaccttcgaaataaacattccttagtggggtaaacaacagacataaggaccctttttgcctgattctttagaattcttttcgcatcatgcggtgtatggatacctcagtggttcttcttttgaggccaaagtggtgagaaaaaaaaggccaacaaagtgaaatctcactgtcaagtgttcagtgtgccatacctcagtggagaactgcttttcatcatttcgccgcacactacttgtttgctaaaatctccagcgacggcctctagaatttggtcgttagggtgaacagagatcaagtctcttaaaagaaaaataaaacaaatggatgcataacatacatgatttcaatttcacagtggctaactactcaacatgcacttggttcattcgccgtcagaagcacaggataaagaacaatatatcaacgaactttaattcctagtggataatcgacctaattaaggcgataagaataaccacacttaactatgaatcaaatcgtaccttggccttgtaacatcatataaaacaatcggtcacgcacaacaaacgcaagaaccgagaactcggactgatcaaacacatcagagtattagcagataaattttggtgtatggcatcaaagatccttctggtagtgatcggcgtcgcggtggtcagcgtggttgcatcggcggcgccgccgggcagccaccgcgcatacaagcggacgtcgtcgtg

SEQ ID NO: 739 - DNA, 2010 bp, Oryza sativa
tctatttactccaatgtacaaataacgaatagtcctaatgaatgaacgcaaatatgtagatcatttaggaataacttaaaaaaatatatatgcagattaatttggaatggagggagtatattttgagaaataaaagcaaaagcaaaaaaaaaacaagtttatagcatggttagatgattaagcatataatgtcatctccaagggcagccacactgaaaaaatgcttctagatcacctcgttttatcctctccgactatgttcacgagtcatacggtcggatcatacaagattggagactcttataattcatttgttggtagaaggtgaatttgaaggttttgtacgtaaccctttacaatttctaaaattagtaattctggatcatttacgtgtaacatcatttaaagtggtatatagaattagctttcccaactcactttcctcgttttccgtacacatgcttaccaaattgctaaatagcatgattttgcataaaaaaatatacaaaagtttctttaaaaatcatattgatttatttttttaaaaaaataattaattcttactaatggatagctccgttttacatgtttggaggagagttcccaactccaacttactccctccgtcctaaaataagtgcagttttacactattcatctccaacgtttgatcgtttgtcttatttgaattttttttatgattactatttttattgctattagataataaaacatgaataatactttatgtgtgactatttttttaaaaaaatttcataaatttttcaaataagacgaacggtcaaatgttgaaaacagatttccatgaccgcacttattttgagacggaggtagtcctagacaacacagggctgtgcacagagtggaccggagcaaatgggatctgcgagcctttctttctttccttccctacccctgctcccttcctcctcagcgctagcctccctcgtgtttcctttccctttccccttttattttttctaaaaaaagggaaacacggaagagaagcgaatcttttccacctccactgggcaaaaaaaattaaaaaaataaataaaattccccattcccccgaacagattgattcgcttcgattcgagggaggaggggagcacagcgatttcttctctctctttcgccgtcgcattcgcctcgcgccgcgccgcgcacaatcccatccgctgctgcccaagtacgcgcccgccctgctgattcctccgatttctgttcgttgtttcggtgttcctggatgagtcggggtggatggatggggttttggttttttggtggcgttaatcctgtattggtcttcgccttttgcagggcttgtttcgcggattcggattggtgctgactcgctcccgattggcaccgggaggtatgaattctcgctaggatttcggtgggcggattgctgacgaggagagggttgggggggagtggagttggatgtgatcgggttgtgggaaatccctagtttgtggtgttgtgatggatcatctggctatcattgcgacggagttgggggattcgtcggacttcgaggtggagggcatccagaatctgacggagaatgatgtcagcgacgaggagattgaggccgaggatctggcccggcggatgtggaaagacaggatcaagctgaggaggatcaaggagaggcaggacaggctcgcccttgcgctgcagcaggctgagctggacaagtccaaggggaagccgatatccgatcaggccatgcgcaagaagatgtcgagggcgcaggacgggatcctcaagtacatgctcaagctgatggaggtgtgcaacgcgcgcgggttcgtttacgggatcatccctgataaagggaagcccgtgagcggcgcttccgacaatattagagcttggtggaaggagaaggtgaagtttgataagaacgggccggcggcaatcgcaaagtatgagtcggagaacttggcgtcggctgatgctccgagcagcgggatcaag

SEQ ID NO: 740 - DNA, 2009 bp, Oryza sativa
ctttaccaagattcatggttggtacagagtcaaaattcaacataattgctactccctccattccataatataagacatggttaaagttggcagagtattcaaaactaatctttgacttataatttctcatatactataaagtttattgcaacaaaattataaccatcttaaagtaaatttaaatgtcaattcaatgatactaattttagcaaataaaatttaatttatattataatagtggttggtcaaatgtttttaaaagttaaatcttgtaatgtgtgcacgacttatattataggatagatggagtattcaaaagaatttcagtgccaaaaagtaggaggagatgtgtcaaacagttgattttcacccaatccattaatatttgtactgcacgaatacaattctatttgaaccctttatttcttagaactgagtgaaccatcatgtacctgtcacggaatttgattcaagtttcacttgtatgagagctacaaccatacatgcatacggttcaacaactattctacttagtgaaatggtaaaccaaatgcgacgaactcctaaagctagtagacaagaacaattcaacatcatgcacaaaaacacaataatagaattcagtccttactgaactactatgtacgtctagaagatatatattataaaaaatatataaaagtttaccagtcaatcaataaggagcattacctttttttctctttatttaccaacacatttagaaatccatgagctagacatctgcattgcatccaccatctgcctccccggtttgcctttgccctgtattgtcagctcagagactcacatagctgcattggttctctgcatgctcaattctgttagaacatttttacatgactagccaccagaatgcacaatatggccggcttgcgagagtacctgacagtgacaagagaaggctgcattgcaaactcatctcagtctcggccacctgttaactgaacctatcagatccaacaaaggtcagcaagacaatgctttagtagctataatatgatactattgctgaatgcctttttttttctgctgaaaaattcagtgatcaaaatgtggatgattgggctgagttaggctgcaatgttgaagaaagcagatctctgaaatcttacaggtcatggtcacttgaaagggcttttcctaccttcctgataccgagagatttgcaagagcctcacttgctgacattgtcatttaggatggaagtcaagcacttgtacttccaacggtttctatcagctgcatctcaaatccgactgctcacagctgtaaaattattcacttttttctgaatctctgatgaaagtcaagcatgtgcttccatgtcagatctcctcctcgctttgctttgagatctcgacgagttctcgttcacctcgatgggtgatggacacagacgggttggtcgccgtcagttgtagtagatccgacgggattgtccgcggcggcggcgaccgaggtgacggccggcggctgcgaagcgaggtcagggaagcggaggagatggaggacgagccgccggagagcagaccgccggcggcgagggattcggaggtttcggcccatgagaagaggcaggaatagggtaccgatccaatcttgaccgtccaaactaggcccgaataactagcttatacgggccctttcttcaacttgggtccaaacaaatcggcccgtacccacgagttggccgatgcagcaggaatgggtttgttcaagtttagattacagtcagtcaatggacaaatggcatacttcctccgtttcacaatgtaagtcattctagcatttcccgctatctaaattcattagtatcaatatgaatatgagaaatgctaaaatgacttacattgtgaaacggagggagtagaagaaagaagatggaagtatactgatgttttccatccattccattctgagctaacccttaacaaaaagggatcggtagtttagaaggggaagttggg

SEQ ID NO: 741 - DNA, 2010 bp, Oryza sativa
gtatggtgttgcggacttgacagaaccgctgaatgtacgagcgaagtgactcatcatcccttcgctgtactgcgtgcaagtccgcttcctcacctgggcgcggatatgtgccttggaagttcatggtgaactgttggcacaaatcctcccaagagtggacagacgcgggtggcaagttcattagccaaccccgcgcctgtcctttcagggccatgggaaagaaattcgccatgaccctgtcgtcacccccggcggcctcgatcccggtcgtgtagacctggagaaactcggcggggttgacgctcccgtcatatttttcggcgatggtgggccggaaccttgggggccaacggacattccgaaggctcgccacaaaggctctacagccgacaccaccaaccgggggcacggagggctgatccccgcgtccgtggtgaggtgacactccggacgaggaggcgccctccgttgcgtggggagcacgtcggccattacgccggcgctcgatactgatgcgggcatccggttccccacgcagatcttcccgggtcggaggcgttgacgaaggagtggcggccgaatggcgaacagcggctgccgctcgccgcgccctccgtcttgacgacgcggagccggtggtagcagcaccagaggccttggtggcggaggaccgcccaccagcatctaggcgctgccgtgcagtcatgaccaatttggccacatcgtccagccaacgttgggctggagactccgggtcatgggcgacgggcgggtgacgtaggagcgcgcccgcagcttggagcgcgccctggggcgtgctgccgtcgccgtagacgaggaggcgacgctccccatctcgccgcccttctccacctcctgtgggcgtcgaagtcgcggatccttcggccctctcgagcgccttctcccgcctaggactttggcgtggagggggcggtggagtacgagctcgacggcgtgggtttggctccccgtcgtcaccgctcatactcggggagaggtcgtgcgcctttgccggctcggccattgggctgaacaggaaaagcttggcgcacacgaaagagtgcgagagctcagaaaatccctcgcagagacccctacctggcgcgccagatgacggagcgcggggctcctcaccgggagaccgcgtaggcccccctttgccggttcggccggggactcagggtgagattctaagctctctgtatgtggaaggttcgcgagacaggaaacacacaagacacgggcgatgtatacaggttcgggccgctgagaagcgtaataccctactcctgtgttttgggagatctgtgtatgaaggagctacaaagtatgagccagccgctcccttgttctgggttccctatctggaaaaatcagtcccctctctcagtgggctaggtcctccttttatatcttaaggggataccacatgcaccatttctctcttttttgtggggacttaccccaccttttcataaatggacggagatttgtatagttgccgtccgagtcaccttctgatgagacggcccacaactacctccactttcgccgggagcaggtgcgacgtggaatcgtggctgtctgctgacgacatgaccggtgtcagaccagtcacgtcggtcattcttgtccaccacgtgtcagcttagcaatctacatgttcgcccttcttcacacaacatcttgcctgtaatggttaggatgaagcctggcatatatctgaccaggactaacgtgccatctctgggaggtaacacgctagcttcagctggggacgagcgcctagaagccctcgtcctgacgggatggggcgaggcgtgcgtcagatcgcctgtcgccacctaacccgcgatttgaccggtctgtgactggtcacagaccggataaacgagtgcactgcactgcgttacatgcggcgtgacacgctcagccaaaccgcaataaatgtggttaggtgagccccactgtgctcacctaacccataca

SEQ ID NO: 742 - DNA, 1999 bp, Oryza sativa
  misc_feature (1005)..(1005): n = any nucleotide
  misc_feature (1024)..(1024): n = any nucleotide
  misc_feature (1029)..(1029): n = any nucleotide
  misc_feature (1909)..(1909): n = any nucleotide
  misc_feature (1911)..(1911): n = any nucleotide
  misc_feature (1913)..(1913): n = any nucleotide
  misc_feature (1919)..(1919): n = any nucleotide
  misc_feature (1923)..(1923): n = any nucleotide
  misc_feature (1931)..(1931): n = any nucleotide
  misc_feature (1933)..(1933): n = any nucleotide
  misc_feature (1968)..(1968): n = any nucleotide
aaaacggatttattataagatttcataatcaataaaaatatattaaaaaagaatcaataaaaatctgttgaaaaaagaggagaaaaaatttgaaggcaaatatgatttgacacgaaggaggcaaagtagacttattttaagagagacccatagacacagtaaaagtaataaatggtgttaaatggagaggaaagtgggaatcaaaccctggtggccgaaatgaaaacttagatagattgctacacgtgagaggtaattacatggaagatacatataccatatcaaacgtggttttggggtagataaaaaaaaaccccggtccgactgttaaccggattaaatccggattttagcgacgcgtgtggtatgacggacaaaaaaacatccagaaatcaaacgtattttttaattattaggtatatagactagaaaaaatgtccgtgcgttgcaacgggtaaagtctattttaatcttaatattgttatatggtttagttaatatgaaattcactgtgggagttcgcttggatatatatattttttgaaaatcatgagctgcagttaggagtccgatcgtctcaagttagcatgagagtttttttaaaacaaatttcttatatgattccttttgtattactaaaagtgaacgattttaaaaaccgactcaaatacgaatatgtatttccgaaaccaaacgaacctaaaaactgactcatacacggataacgtaccgacataaacatcttcaatttttataatagcagagatatagatttcttacacattagtcatcagtctactattgaataatcagataaatcaagtattttaagtaggaacaaaaatttttatgaaaattcgtgtataagtagtaccattttgaccgtttccgattttagcccgtaaataaaattcgattttctttctattcctttagcacataatacaacctacagtaaatagttaaattggtaaatatataaaaaaatccattttaactcacttnaactattttgataaagcgnttaancccctaaataatttttcatcctgttttatacccccacccccgaactattgaaagtggttccgcttattttctaacagcatttcttttttttatctctctcgtataagttatatacgtttgttcgactaccaatcttcgttgttaactttctcaatattcgtgccgtgtattattacgccaataccgtaaactagcgactatggtttgtgtgtgttgtatcattacctaattagagctagctctgccaccactgccattctacctgtattttaaacctgcatccgcaactggcacgccatcgcctgacggctggactggagtcgtgaagcgaaccggatttgttctcacgtggatatggtgcagcgctgcacaccgcgaagcttccactggcaggtggtccccggctgtcagccagttctacggccgtcgaagaaacgttccgaggtttgtttagcacgccggtttccgttcgtgcgtggggacgtgggggttttgccccactttccaaaaccacctattcctccgcgcgtgcaccccgagccgttaacgtcaccgacacgcgggccccgcgaaacgggtgaccccgcatggcagacaaagtaactcgcttctggagaggtggggccctcggtcgaggttcccgtagcggacgacggggaggggaagagaagagaagaaacggctactcctccccgcgcgccgcgcgcggctgcgttggttttggggttttggagcgttgcggattgccacggcgcacgccaccggtggcgcacgctttacaggtggctcccccgccgtctcccccgcgtgccctcctcgccgtcgtcgctcgctgcccatttcatcccccgcacggcacgcgcgggacgaaagcaaagcncncncacacnctcnaacccgcncntcctccgctctcgtccgtcgcttcggttcggttcnggctcgatcggggaggttcctcggggcgacc

SEQ ID NO: 743 - DNA, 1999 bp, Oryza sativa
  misc_feature (1311)..(1311): n = any nucleotide
  misc_feature (1341)..(1341): n = any nucleotide
  misc_feature (1414)..(1414): n = any nucleotide
  misc_feature (1433)..(1433): n = any nucleotide
  misc_feature (1445)..(1445): n = any nucleotide
  misc_feature (1616)..(1616): m = adenine or cytosine
  misc_feature (1619)..(1619): n = any nucleotide
  misc_feature (1621)..(1621): n = any nucleotide
  misc_feature (1678)..(1678): n = any nucleotide
  misc_feature (1727)..(1727): n = any nucleotide
  misc_feature (1861)..(1861): n = any nucleotide
  misc_feature (1864)..(1865): n = any nucleotide
  misc_feature (1878)..(1878): n = any nucleotide
  misc_feature (1889)..(1889): n = any nucleotide
  misc_feature (1910)..(1911): n = any nucleotide
  misc_feature (1915)..(1916): n = any nucleotide
  misc_feature (1953)..(1953): n = any nucleotide
  misc_feature (1963)..(1963): n = any nucleotide
ctttttcaagccttcaccttgaaaccgctagagtaaaaatataaaagtttcattctaaatttattgttacctttatttgaattattttattttctatggcatatcagtcacgaaataatatttctaacctctgatgcattatttacgtagaaaaactgcaaatgtaccatactcactccgtctaaaatataagagattttggatggatgaaacacaacataatattacaaatttggacagagagcatgtccaaattcgtagtattaggatgtgtgtcccatccacccaaaatcttttatatttttagggtggagggagtataatccatgtctcgatgacttcatatgctacccctggacaggatgtaccctcatttttttttgcatgtcactcaaataattatgaaaaactttgagaagatgtattaatatgtgatatatccacaaacattttcaaattcaacttctacatttcgcaacgaaaaaaaaacaaatttgactatgaatatatgttaattagctgtagtttaatttgtttttttcgagatgtaaaagtttaatctgaacttgcatgtatatggagtgatatacattcatattcgtatctttttcataattatttgagtaatatacaaccaacaagagagaacatcctctcgagggattaaaatagtttccatcctaccagcttgttaacgggccaaacgtcaccattatgagtcatgacatgggggaggaagaagggcctattcacttagatgctaaaaaaacattaccaaattttggcattgccgaaattttggcaactgtgtttgccaaaatttttgcaggatttcttatataactaccaaaacttggcagcaaactaaatataaccactttttagcaattttattaaaatttgataaggttaaaaattgacattgcagtgatcaggcccgaaaactttcgacgacgaagccgcacaacctgcctcgccctcgcgccctgccatgccatgccatgccatgaacgagcgggaagctctagaagggccggaattcaaagccgcgactcctcccctaaacctggccaaatgggccgtgccaagccgggccggcccgagcacggcagtactgtagccggcccaggcccggcacggcacgccagcctgtgggccgtgccggcacggcccgttatcccgtgccgtgtttgggccgatgcctcagcccgtgggctggcacggcacggcacgtttactgtagcgtaccggcacggcacggcccaggcatggcacggcccaccggcccatttatttttcctacgattttcnaatttttcccatatatttctcatatttttnatttttttccacattttatcctatttgtaccatatattttatgatatatttcctaaattttcctcacatttancctatatttatcatttttncctttatattangttttttctgcctttttcttttttcccctcaaatttcaatttttatgggccacatgtactagtgggccggctaccagcccacgtgccactacagtagccgtgccggcccggtacggcccagcaccttcttgggctgtgcttgggccgtggccttggcacgtgggccggcamggnanggcccgctataggagccgtgcctaaggcccgtgtcctagtgggccgtgccgtcggcntgccgtgtcgtgctgggccgggccgcccgtttggcctgctatatcctcncccacccccacccctacccgcacccgtaactcccccgccgcgtcgtcggctctcactgacaccctctggcccacgcgatttccctcgcccgccgcgcccctatccgccacgtgccgcgtgtcgcgcctcccccntcnngccgcgtgccccntccccccgccnacgtcatcacgcccacacagnngttnnaaactccaccaccaccctcgccaccaacctttcccantgccccatgnaccgcgctcgctcgcttgatatcgatcgatctcacc

SEQ ID NO: 744 - DNA, 2000 bp, Oryza sativa
  misc_feature (570)..(570): n = any nucleotide
tgcaaatttctgatctcatcgactgctttgattttgtgccaggccttcctccagctccagcatcctctgatgcgaacggtagtagcccgatcgacaagttaggttcagggtggcgtcgtcggaataagggggagggggaggaagagatgaattagagagatggtcgtggaaagtggtaggcatcagtctgagcgaggagaggaagagaggagatcagatgaggtggcacacaaatctgaaagctagctaacaatacaaaatctgcaaaatttttagagactacgttttctatcaagtaatatgtaataaacagttttaaaaatacttttatacgagcattagcgaatccaagacaaaatcattactaattgttattgcggagacgaacgcatggactccaaacatttttttaactacacggcagacgcagacatacacgcgcacacaccactccatacgtaacaccacattcacacccttatgaatgcgtttcctaacacatgctacgtaaaccagcgacgcatctatgatctctctaaaatcatgttgaaagttcatctgcatatgcanaatattcgtagggcatcaagatttaaaccgtagtggatggagtcatggacacacgattataccaccactactccactagtacgtgcttccccggcctggactcgacacatttcaatccaacttaagaaaaaaaacacattgcaatgatgaaaacaagaaaatatatatgctgctcactacattcgaaaatataatcgatatgaaaagaaaatcatgggttgtcgattaacgggattatcggaaattttatcggtgataagaaaaaaaatcagacaaaatttgttaaaatttcgctcaatttgtgcaggaaatcctagctagtattttgtatagaccatttggtataaaaaataacatatgtagggtctgttcattttgatgccaaaaaaaaccttaccaaattttggcattgccaaaattttggcaactatgttaaaattttgacaacttgttaaaattttggtaggatttcttatatcaaaatttggcagcgaactaaatgtagccacttttttgtcaactttaccaaaatttggtaaggttgaaaatggcatcaaagtaaacaggcacataatatgcaaatgatcaggataagtgcaaaaaaaaaatgatgtagccagtcaaagaacacagtgtcacgcatgcaaattcaaaaaaggccgaatttttggctgatacttcctccgtcccaaaataagtgcagccatggttttccacgcccaactttgaccgttcgttttatttgaaaattttttgaaaaaaattaaaaacataagttacaagtaaagtactattcatgttttatcatctcataacaacaaaaatgctaattataaaaaaatttcaaataagacgaacgatcaaagttaggcgcggaaactcatggctacacttattatgggacggaggtagtactgtttttgatgggtacccaccaagaaacacgaatttcggaaatttcgaaacatgtgttgggctgtaagagcacccgcaatggtaaagtaaggtgctctctataaaatatttatatctcagcaatagactagattaatagtaaaccaccttaatagtatgtctacatgggtatctatagctctctcatgcattgcctgtttttctctatagattatctccaggttagtagatagctttgctctctctctcttcatttaatctcttccaagtaggacaatatactgacatggatctcttatagagagactatagataactattgcgggtgccctaaggtgaacccattaataacaacctagtacagaaatcaaacttggttttgctgtagaattagttagaccggttttcgtgcagtaggaggccgggacggaggaattaatattgggccggctagcaagcacactttgcattgggcccataaacagaaggcccaaggcaaggcaagagagagagag

SEQ ID NO: 745 - DNA, 1151 bp, Oryza sativa
  misc_feature (2)..(3): n = any nucleotide
  misc_feature (6)..(7): n = any nucleotide
  misc_feature (15)..(15): n = any nucleotide
  misc_feature (25)..(25): m = adenine or cytosine
  misc_feature (33)..(33): m = adenine or cytosine
  misc_feature (143)..(200): n = any nucleotide
gnntgnntgacgggntatacgttgmagggatgmagtttttttactttttttttgtttttgatgcaacaaatcaacaaatggaggtgcatcgatctcatttttacgatgagttgtagtatatatacataactagtacggactannnnnnnnnnnnnnnnnnnnnnnnnnnnnnnnnnnnnnnnnnnnnnnnnnnnnnnnnntttgatttcacgcgtgtgcgaggttatttgaaagggtgattttactatccttgaaaaaaataaacccaggagatactgcatttcataaatttgataccacaaagtaataagtatcttaaatactgtaaaattgatctatttgaaatagaatcgtacctttatgtgtctctaaaggttcatacgagggacggactacgtaatagttgacagagagtaaattgaaatcttagacaccttagatatagaatcatagataacgacaaaaagttaacgatgccatcgattgggagttacgaaaaatattaatcatctgacacgtagcaatcctgttaatacaatttgtatttgctatatatatgttgtagctatcattctatgccgctctaataaatatgcttccattccatcatgatggacacatatatctctcttttctctctgatcaacggttggtgggtgataacagggcatatatgctggacctttttgtggctttcaaaaattatattctgccatttatttaactcaacgtgaaaaatatttatgcgcgctgcatgtgaaggggaataattgatgtggaatttaactcgagtaattcaataatatctaggtttattttgggatgcgatcggacccttataaggtgcgatgagattcctatgacgtctcttgcgtgggccattgtgaacctgttggttatgtggctaacatatgagctaagttagaggattcagttcttataagggtaattttaccattctagtgtaaaattcgatatctctagatactgagtatcttgaggtaccaaaaaaatttagtttaaaatttaggtagctcagatacttttttttaagaactataaaatttctcttcttataatatgacctttatgcagctgatgactcatggagttaactgttccttgcaggtttagtagggttttaagtttcg

SEQ ID NO: 746 - DNA, 2000 bp, Oryza sativa
  misc_feature (555)..(555): n = any nucleotide
  misc_feature (662)..(662): n = any nucleotide
  misc_feature (671)..(674): n = any nucleotide
  misc_feature (685)..(685): s = guanine or cytosine
  misc_feature (686)..(686): n = any nucleotide
  misc_feature (687)..(687): s = guanine or cytosine
  misc_feature (688)..(688): n = any nucleotide
  misc_feature (695)..(695): n = any nucleotide
  misc_feature (698)..(698): w = adenine or thymine
  misc_feature (699)..(699): n = any nucleotide
  misc_feature (702)..(703): n = any nucleotide
  misc_feature (722)..(722): n = any nucleotide
  misc_feature (750)..(750): n = any nucleotide
tgtgcaattggtttttttttctcacatttaatgccctatgtatgtgtccaaacatttaatgtgacgtttctttttggtcaaaattcacattttaggctgtgtttagttcacaccaaaattagaagtttggttgaaattggaaacgatgtgacggaaaagttaaaagtttctgtgtgtagaaaagttttgatatatgatgaaaaagttagaagttcgaagaaaaactttaactgaactgggccttggagtctttgtctgggaacaaaatgttcaactgttctagtcaagatctgactatctgagaggttgcggggagttcatgctgtctcagtgctccaaccatggggaaaaacagagaagtctcttcgccacatgatgctgacatgctgtttcgcattctactccgtccgtcaaaaaaaaaaaaagacaaacctgatttccgtgtccagcgtttgacagtccgtcttatttaaaaaaattatgaaaaaaattaaaaagacaagtcacgcataaaatattaatcatgctttatcatataacaacaacgaaaatacnaattttaaaaaaacttcatataagacggacagtcaaagttggacatggaaaccaaggtttgtctttttttaaggacggagggagtaatttctaggcataggtgaganttggtcacnnnncagaattcaasnsnctggaangawntcnnagcagcgtcctgggttagntgttgtagaaattggtagaagtagtgtntactaactgttctagacattattgatcgttaatcatgtgatttggaaaggataaatgcgtgttctatatttccatacagttgctagcaagtgtttttaccgcctacgggggtaatagactgatagtatagttaaagtttgaagcgaaatagagggtttttctatcaactttgcacttttatttacaaataataataataaatgaccatttacaacaactactttggactcatcgcttataagcttaaattaaagttacctaccacataatcatccgatgctaggtgttcggatggatttgtgttgcttcgttattagattctaggtctacgcttcggtgcaaattgttgaaaattcaggcatgtcctctaagagtttgaccacaaacttttctaaaacatcaacatgtatcttttgtgttacagaaaacattcaaacctttatcatcagagggtgcgtgtacaagtacaacttaattacaaaaaaaacattcaaacctttattcagagtagtagaagcagaagccggcattaaagagggagaccataaattggtctgcaatttgcaaagtccttttcaaatagctgaaccttttttatttttaatattgccaaattgatgaatgttgacaaacctggtttgatttggagggaattttcacatatttatatagtagaaatttaaaagttcctggatgtccaattgccaatccccaaaccaaacagaggccgtgtttagtttctcctccaaaaatttttttgacgtatacgaacacacatttgaagtattaaacgtagactaataacaaaacaaattacagattccgcctgtaaactgcgagacgaatttattaagcctaattaatccgttattagcaaatatttactgtagcaccatattatcaaatcatggtgtaattaggctcaaaagattcgtctcgcaatttacatgtaaactgtgcaattaattttttttcgtccacatttaatgttccatgcatgtgttcaaacattttatgtgccggattttttcggaagtttgaagaaaactaaacacagtcagaacctgaaaagtacaattgctgaatgttctcaaatacctgaagaaaaaaaattcctcctttttctataaagcaaaagcttcacagagtccaggggcgcacctacagcaccaagtgtaaccagagcttacacaaaaaaaaggcaccacctttgctcggtgctcgtgggggagagagagagagagagacag

SEQ ID NO: 747 - DNA, 1999 bp, Oryza sativa
  misc_feature (1748)..(1748): n = any nucleotide
tagcttatttgggagatgcattggtacggatatagtgtttgcttatgcaattactctatgtcatgacaatgatattagagtagtatctagtagtttaggcgtagtgtctagattacgggcaaatagcgaaagaatgtttcagttcactgcaacatttgatccatacatagtgaaacattgcgggtatactaaacgaaacatttttcgatggaacaaaaaataaaactaattctgagggtttccaaaatatgtgggttttttgttgcaatagagtatctcaaatcactgcaacattagatatataaatagtgaaacattgtgagtacattaggtgaaactttttggtggaacaaaaaaataaaacaaattcccttaataggggtttccaaaatacgtgggttttttttgtaacagcgtgttctataatatcaaaattcactgcaacatttgatccgtacatagtgaaacattatgagtacactagctgaaacattgtaaaactactggttgaaacatcaaaagagaccatatgcaacatttaaaaaaatcaataaaaaattaaaatatttttttattaaaatataatcatgtgtggtcttgttgtaaagatttaattgtaacaatttagtgatgcaatcagatcgtacattagataaatagtttatgagaaaaaatcttttgaagaaatgagagatggaagcatgtagggaaagattctttgcatacaaatggcagaccatgcagcgtctgatttttctcccctctcatcggaggcctgacaactagcattctccgttgaaaattacaagtgtacaggttaaaatttaagagtgtacgtacagtggttgcatgctgcaattgtacagtcactttaatgcacgtggctgccgaatatgatgggaactattatggagaggacatcttctctttatttacatgtatttaaatgattatgaaaaaaaaatcaaattactatgtgataggtcattccaccaatacgtatggtcaaatttaacttctaaaatgttacaacgaaaaaaacaaatttaattgtaaatatacgtcgactagctatagtttagttttatttttttttaacttattcttgacggtcgttagcgatcagtttcgaccgtcaatattaccaaaatagagaactaattatgcttgcaatgcatatccatgttagaataataatatttcactagtatttggttcactaactttttgcagagaataatcataaagtggaggagcatcgacatcaaatcagacgatagatcaatcggacgatgtcgagaatcaaaattatacatgaatgggccaagaactcataattgacatgatgaactgggccaaaattcataagtctacgtataagagcaaaggaggaggccacatgccaagtttaggccaggttgggccggcccctggtttggccgaacctcccgtggcgccaatggatgcagggtcttgatggacggctgggattgatccccaatgacgattggaggatattactgacatttccaaccatcataaccgtcattacctgcatataaaaggagctctcatcctcacttcactcacacacctcaagcaagagctctctcatattctctcaagttagtttagtagtcttaagctagtggagtaggaatagagtagaaatcggagtccggaagccttcggaagagttcgggtatggctctagtagctcttctcttctctttcgtaagctttgtacnttttattagaatactcttctttatacatttatggtattgaaatactttctaaatatataaatgccaactttacattatgttcgtgttatactgattatactgctagcttatctgggagatgcattggtacgggtatagtgtttgcttatgcaattactctatgtcatgacaatgatattagagtagtatctggtagtttaggcgtagtgtctagattacggtgtatcattatttggggttatatgctgcgg

SEQ ID NO: 748 - DNA, 1999 bp, Oryza sativa
  misc_feature (1943)..(1943): n = any nucleotide
  misc_feature (1946)..(1946): n = any nucleotide
  misc_feature (1949)..(1949): k = guanine or thymine
  misc_feature (1953)..(1953): y = cytosine or thymine
  misc_feature (1956)..(1956): w = adenine or thymine
tttccattgttgctccgctcggattccgctcttcttcttcttctccgtctccgattcggtctcctcctcctctgctccgaccaggattctgcagcggcagcggcagctgctgcggttggtttttcaggctcggtggcggcaggcagcggcatgtgcgtggaggaactcgaaggcgcagagaggctcgattttggtggggttgcggagctcgagacaacaccggcagacttcgaggtgagtagagtaaactcccggatttcggaagctccctgttctttcttgctttctttctttctcgtgttcttgatgcattcgtttgtgatttgatttcgcaaccggatgcttttctttgggtgttgggatgatcggttgaggggaaatccaactgaggtggttgcgttgggtatactcttcgcgtgcccgaatgcttctattttcttattttcttttcttgtctggaaatctggagaaagtaggagagattagttagtttattagtaccactgaaataaatgaactcccttatcaattaatataatataatatttcaacgtttttttagtatagtaacaactagcagcaaataatttaggaaattgtttgttcttgaacggaaggtgtgaatgggaagatgcgctttgaattgttcagcggcaagaggaagtttctaggaggagagggattcagattgcgtgaaaaacacaatctttttattttttggggtgccttgtcgtagcttgtgggtgacttgtctgcttgcgcattgcgttgttctcctgtacttttgattctgtggcgagaagtcgtgtgggattttcagttgatgtgttcgtactactgcatcttgtgcgcatgcgtatctgctctgattctgatatgctgtgataagatttttatgcatgtgagtgacagtgagtactacctgaaaactcttcgtaccaagcagaaatgaactctcttaatactgtactgcagaattcaagaaagtagtgtactttgtttctcttcaaatcaagaaagtagagcaccaaatggatattagaaagaatgtcctttgtgatgttatgcctttagaagtcaaatgttatttacatgcagaactgtcaatcaataaatcagtactggtaaagttcagtggtacttctctctcagttgaggccaagaaaaatgttcttttcttaaaatgctggcctcctggttaagactgttgtttggacaatgcttagtgacccttgtgatttgtagctctagaagtactacataatatatcttctgatgaactgtgaaccccgtcgttagaccttgatgggatatctttgtcgctttatcttgtaatgatggttgcaagcaggaaatggattatggagtgttgcggaagaatgaacacctggtggattttcatggctctagtactaattagtttaacagggattaacagttggagtggctgtagtcctatcatattgtcacaactgttgtgccttttttttgtcaagtcatatgctcctgtgtctgttttgcctgaaaaatactaagctgtactgcacttttgtgcattcttgggtgttttgtttactaacgccctctctagaaatggccactcgtaggcttgtccaataagggtttgcctcttgtcacctagttgactgaattggggcttctgtttctgtgtcgctttcaactaggtggattagtatttaccgtaagtagttcattttcgatgtgatgaatgatgatgtcgacagcatcccttaaagcaatttgtgctcttggcagagttgaagtgctagtatattcatttgaagttttgaactagcatcatgttctgccaaagttggcattgatctgttattttttataaggctgacgtcctctgccaatgcttgttactatccttaaggcatttagaacttgtgttgtaattatgcttcatcagagttgcntcntgkttcytawttttgccatgctctaatcttttacctttcttggtaatgtgcag

SEQ ID NO: 749 - DNA, 1999 bp, Oryza sativa
  misc_feature (874)..(874): n = any nucleotide
  misc_feature (1084)..(1084): n = any nucleotide
  misc_feature (1114)..(1114): n = any nucleotide
ctctcaagcagcaatgcaacctttggtaagcagctaacaatcactacgcaatatgtttgtagcccaatttcaagacttaccgatcatttgtgcaggagggtgtgaaacatgggatctcttgcttgtctcaagactcgtatggtgcctatattgctgcgtcatgcatggataacaggtataaccgcaatcaaccacactgcctcagacttaatatgccatttgtgaaggctgcctttgactttataagcctttcaggatctatttgtacagtgctcttcatatggataaaggcccaattaaggcttacactggcagcaaaattgaatctttttttgtcaaggtcagtgagtgaacaagctgagttgatttccatttttcaaaccgcatgcctgcttgttcttaggtagttttatctgctatgttttataacacctgatatgttggtcaaatgcagtctgctatcagccctgatggaactcacattcttggtggttcgagtgatggcaacgtgtacttatggcaggtagttgttggatcatgttatcatttcgcacacgcattagctgctcttttactttctattcatgccactactttttcactgacataggtggatcagcctgaaagaggtcctataattttggaaggccatgaaggtgaagctacttcagttgactggtatgttctacatacaattgtagtttttttttgtgtaaatcttatcaaccatccaatgttcagatttcagtacgattttttcacaattttcaggtgtgcatcagaggtcgggaagatcgcaacgtcatctgacgattccaaggtgagtatgtgattaaccttgcaaattttgttcattcaactttcatgaatcttnatgagaatgagatccttttctttttctattacacacctacatgttgcaagcgaatttaaatgcctgttttggtatgtagaaaggggagctgctgatattcagtattttttttaagaaaaccactgataacaacactttatgatgtgtatctatcaggttcgcgtatggaatactgagagaagggtgttcccaaacacaagttccccaacngtcatccgcaagagaataaccgcaccaaanactggaagccggtctgctagccatgagctagctactacctcaagagatgtaggagtagcagcctgcaccagtgcagatggtgaattgccaactggttcacgctctccccttcagcccagagtactggagtttggcacaccggagtcagcgaagaagagagcctttaggttgtttcaggaggactcattggacataaggaaaagcccagaggctcaaatgaacagcccttcttcggttctaagccccccacattcactgaagaggagaacaattcgggactactttgctagtagctcatcttgtgagcacaccaagcatgtccatgaccttgcactcttggctcactcgtcaactgtgaagaacctcaaaaatgctcaatatagctacaggtgcctgaaaaaataactttaaagttttgaacatcgatttcactaaacaacaattattatctccctctgaaatgttgctacctaagatgatagtttagaactctagaatcattgtcggcggagaaagtaaattattttccccaaatttccagctatgaaaaaaccctcaccaaacaccatcaaacaagagttcaccaaaccgcccatgcggccatgctgtcacgcaacgcaccgcattgcctgatggccgctcgatgcatgcatgcttccccgtgcacatatccgacagacgcgccgtgtcagcgagctcctcgaccgacctgtgtagcccatgcaagcatccaccccctccacgtacaccccctcctcctccctacgtgtcaccgctctctccacctatatatgcccacctggcccctctcctcccatctccacttcacccgatcgcttcttcttcttcttcttcgttgcattcatcttgctagctagcttagca

SEQ ID NO: 750 - DNA, 2020 bp, Oryza sativa
atatgtatgtatgtatgtatgtatgaaacggaggaagtaatcttacgaggtaattaattagaacctgagctgcaaaaatcacaatgagctgaaaaatatgttcattttatgtctcgtgtggaagtcaacgaataaattttagcaagtgtagcaacacgattttgctacggaaccgcctatgcatcactcggatgataaaaaatcacctagattttttctttctttggatttgcatccaacggactataaaataaaatgactaatataaatttacttacacaatatttttatcaaaattacaatgcacttacatatcatatcaactaaatttacatatgtaattttagttatataggactgtaattttatatttgaaataaaataactaatacaaatttacttacacaatatttttattaaaattacagtgcacttacatatcatattaactaaatttacatgtgtaattttagttatataggattgtaattttatatttgaaataaaataactaatacaaatttacttacacaatatttttatcaaaattacagtacacttacatgtcatcaactaaatttacatatgtaattttagttatataggactgtaattttatattttaaataaaataactaatacaaatttacttacataacatttttatcaaaattacagtgcacttacatgtcatgtcaactaaatttacatatgtaattttagttatataggactgtaattttatattttagtttcaaatgtcttaatgttttaaccgttaaagaaatagaaaagaaccaggcgtaagcatccaacgcactgccttatccatgcatgcagccccaccaattcttgcataaatcttggcccacatatggtgcgactaaaaaaacgtgaaatgcctaagaaaaaatcacacgacagacgtgtagcctctctccccttcacgcccggcggctggggatgccgctcggcggcgacggtggtgcccagatctgccatggctggccggatctgggggagtggcagtcggcggcggggaatgaaggtggcggcggtggacgatgcgatgtgggaggtggcggctggggacgccgctcgacggtggcggcgcccagatccgtgcggtgctagtcggatctgggggagcggcagccggcggcggggaaggaaggtggcggtggtagacgacgtggctgtgccggagttggcggcggcggctggtggcgactgcagctagatggcgtccgcgtcggtgactgcggctgccgacggcggctggctgctggtgaggaggcggctggtggcgaggcggcggctgctatgatgactgctgaggcagtgacggtggtggcggctactgatgcactggctggtgacgaggcggcggctggcgagctgtggtggcagccggatggctgctgtggtggcagctggcgaggcagcgtcgcggcggtggcggccgtgtctggcggaggcgactggcgacggtggtggatgcggcggcggggaaggcgcggagaagcaggcatggcggcggggaaggatgcggcgacgggggtacgaacgcggtgtcgtcgaccggaaacgggcgatgatggctgcgaaaggacggcagtggtggcggcggcggtggaaggaggcatggcggcctcagacggctagtcgagggcgtggcagacggctgcatttggccgacgcggcaacggttggaggagggtcggagaccggcttggcgcagagaggcgcagccgatggcagcggaggccggctcggcgtgagaggcgcgggcggcggagatggaggccgtcttggcgcgagaggcgcggccggcggtaaaggaggcgtccttggtgcgaggaggagctgccggtggatgtggcgcggtcttcggcgcacgaaggctggccggcggggggcgccggtgcagtggtcccacatgtcagcagaggttgagtggtggtggagcatcggtgcttcagccatggattcgtaggtggtgagcagtgggtgaaaacct

SEQ ID NO: 751 - DNA, 2000 bp, Oryza sativa
acagaatgagttatttttttctgatactgatgataaaagtaataagtttaacacttttttgatagagagtatagtataggtacgccaccaaacaagttgcaatatggtgtggaaatcggaaacgaatggataggatagaccgtaggagcatttgttgttttccttcgtttccctttcggagtgttgcacattgcgccacgtggatcctgatagaatagccactgaatacacaaatacacaatggtactcaataatgttactcctatgtacgcaccgatcgtaccaagtacaggagcaccaccaccacttgtaaacatcttttctgcacacccgatttgatgggctaattaagatatgacaagtacagtagtactgctagttggctgtccgttctactaagttaggccatgtttagttcacaccaaactttttccaaactctcaactttctatcacatcacatcacatccaaaactttcctactcacgtaaactcccaactttttttttcaaactaccagttttccctaaacttctctccaatttaagaaactaaacacagcctccagactgatctctagactgatagtacttatcattttggataatggtgagatcaaatattaaaatctttaactatgaataattttttaaatatttatcttagaaaattggagactagatatatagattagtcttaaaaactactttaataaaatcatatatttgttgatgctttttatatattataatagaaaataatgatcaaagttactttttatgatcatgtttttatctaaaacgataagtattactccctctaattttttttgtttgacgttggttagcttaaaattgaactaaccaacgtcgtacatttgtgcaaggaggtagtattaatctgcagggagtacttccaagtcgcttgctgaccttggtgatctcacctgagcgccacaaaaacgatcgccgtacgtttgacttaccagcttcaaaaagctgcctcgagtttttttagcccaactgtatttacgtttgccggtcagcgctgacaaaagttactacgaacccatcgacgggcccctgtcggtctcgtcctcctcctccgctttaaccggctcacggaccacggcgaaggccaaagcgacgtcgcgcacgggcgcgcggccgcggcggcacatgcagcacgccgaccacttgcctccccccacgaaacttttctcgctgtcacctgatatctctttccccccaaccaaaccactagacattggcgtcacagttctgatcgggttggtatgctctgttgcaacatggcagtgcaaatttgcaacggaaaattgcagcagaaaattgatgctagtagtgtacgtagttgcatgtatttgggcctggacagtacatgggcctggaagcttttctcgtctgcagattttaggattttatatgggcctgcatatgattctctctcttttttttttttttgaacttttgttgatgtcaagcatggcgcgaatgtgttgcaggggctggtggtcctgacgatccaggcgaggacgccgtcgctgatgccgccggggtgcgccaaggttgccggcgcggcgtgcgagccagtgtcggggccgaagaaggcaatgctgttcgcggggctgtacgtgacggcgctgggcatcggcggcatcaagggctccctcccgtcgcacggcgccgagcagttcgacgagcacgcgccgcgggggcggaaggggcgctccaccttcttcaactacttcgtcttctgcctctccgtcggcgcgctcatcgccgtcacgttcgccgtctgggtggaggacaacaaggggtggcagtgggggttcggcatctccaccatcgccatcctgctctccatcccggtgttcgtcgccggctcgaggctgtaccgcaacaaggtgcccacggggagcccgctcaccaccatcgccaaggtcgtcctcgccgccgcgctcgctcgccgcggcggcgcgca

SEQ ID NO: 752 - DNA, 2000 bp, Oryza sativa
caacggctttccccggggtgaaagcctgtccctcgactaacgccctagagctgaccaactttgccagctcgccgtcgtctatgagagaaatccccaaataggcagtggtgtcgtcgtcaatccggccggggtcgggccctttcgccgaagaggggttaggcttgcggggagccatgacgatggacgtatgaagtcgcgaagggtgtgtgcagtggcgaacaaggggagtgagcgagaaatctaaagggccaaggggggccgtgaaagcaagaacggaggaagagaacgcgggcggtgaaagtggcaagtctagcggtgaaaagataacgggggagcatatatagcccaacaaggcgacggttcgcctacccaccagtaataaagcaccacgtgtcgcgagggtaggcgaaatggtagattcctatcgaccaagctgcacagtaaaaagcccacaaagggaaggcccattactgttccttttggcccggtaaaaaaataaaaaaaatatatatcaccgtccgcaggaggcgaagagcggcaaagcaataccagccgcacagacaacaaactttatttgcaggaacaatgtaggtttcggcaggagcatcggtcgaaagggggcgccacataccataccacataccacatggtttgcacggtctcggccgaagctccaatctcacccttgcccatgaggggcttgttggcggtatggtatgaggcccttcgaccaaaatctgccgaaggctatgcgaggagtggggatccaagcccgagacgccaaagttagtcggggcgaagccccccccccctggcgaagactatggaacaaggacggcgagaggcggaggatcgtgcgggtactctgccaagccagaggcctcttgggcgaaggatgcagggcgaagagtatatgctgaagggagacgacttcaccaaagcaagctcgcccccgcgagggccgaagaagcctttttcggcctatcaagcataggggccattaggccgacgatcgcctaacggcccatcaggagtccatgaacctctgttacactatgtacccatgtaaatgtccctttcataaggataaccatgtaaatttccctgtataaccaaaaccctaatagtaagaacatgtaacaggggctataaatagtcccatagggccaggtaatagggggatcccaagaaaaattctctaatcaatatactttactttttcttaaccactgttgagtaaccacgtctttcgacgtatgcggttgtcgtttctaacaacaaacatcaagcctctctccgaacggtgtgtcatgagcctatatcattacgtcttatgtataggtcacaaaacaacatattaccagaaaataattttagtactttaggggacaatcgttatttattgggagtttttttagttgacttccctattgattcaccaacttttttttgggttcttcttgtagtaatcgatagctaacctagtcgcatggggaacacgtacggtctaccctgccatccacgcacgctcgttgcgaacaatcagagaagctcaaatcctatttggaatcgcccctaactcccaaagcgctataaatacagggagtccggtcacacgtagcggtaatagtgatatctctccgtatttagttcactccaaatgttatgatcctagtggtaatgttttttgccggtgcaagtggcaccaggtgggacattgacatcccctagtcaatcgctatactgagaggccctcgcgtcgctcccgcatgggtgacacgagcggcgcccaacaccctagcaccgccgacacccttcctcctacctccaccccgccaccgcttgagagaaccaccgaaaactgagtggcgaccaaggacgacggtagcaaggcacatgttcgcttcatcccgtccacatcaaacgtggagaggggcgacgaaggttgggaaggggaggtgacgaagaccagcgcgaggtggagcagcaagcgtccatgg

SEQ ID NO: 753 - DNA, 1999 bp, Oryza sativa
  misc_feature (786)..(786): r = adenine or guanine
  misc_feature (942)..(944): n = any nucleotide
  misc_feature (948)..(948): n = any nucleotide
  misc_feature (951)..(955): n = any nucleotide
  misc_feature (1028)..(1028): n = any nucleotide
  misc_feature (1040)..(1040): n = any nucleotide
  misc_feature (1145)..(1145): s = guanine or cytosine
  misc_feature (1210)..(1210): n = any nucleotide
  misc_feature (1907)..(1907): n = any nucleotide
aacacatcttttctgaccaaacgttatataaacaatttagaacttcattatgttgcttgcacatactataccagtgcactccatataatcaaccaggtaaaactagtttggatgaactggaactaactagcacaattagaaaaagaaaatgaaagatggatttacataaaggttgcctgagtacagcaacacagactacaccgaaatcataggagtaaatgcacacagtactctgaaatttgagaagaaactattaccgatcatctcttccttcatcttttcccttttctcagctgccagtggctccagtcggaacagtgatctcttagcttgttcatttgaaggatccagctcaataatttttttcatatctgagatgaggattacacccagcacaagaggacttaaacaatatggcatcggagctaaatactcacaggtaatagtaataataatagtgtgaaatagtctctaaatctaaagcacgttatgagaataatatctaaccagcaatagcttcatcatagtgttcaagcttttcatgtgcttctcccctccggagcaaggctttcaagtatgaaggattcagctcaagtgctttggtgcattctttgattgtttcatcatatttgccctaaattacagggtgttagcattgtggttttattataatatgatattactcaaacaaaacaactggagaaaaataatctgctgataaagaaaataaaatgccattaaagtaaaactaaagaaataatggttgatttcaactaccaaacaccrgaaaaaaaaaaggcctagcctagcattttatccaggcataactctctattatactttggaagcaagtttatacaaggaataaagaaataggcatgtagccactgtacattaagaaggataactggtttttaggagaaatctatagttaaaggggtnnntatnctnnnnntaggggactaggggtaacatattaatgaaataagcacatctaccatgatcctgttgcgaattcacataagganaattattactgntgacaaccaaatggaaatcatctatttcctccatatttaaagaccaatagaaaggcttaccaacttcaagaagcatacagcacgatttgaatgacatgcggagcstatgtcttcggcagattccagctcagcagcaatttgcaaagctgtctcatattgcgacaatgccntctcatattctccagcaccaaaaaacttgttcccttctgcctttgcatcatttgcttggcttctagctttctacaggaagtaggaagcacaatcatttatcagaatgcaataagcttataaatctcttcaccaacatacaagttatatctaatcccaaccatgtcaacaaggtccaaacaataacgtccatttagaaactataaactggtgaatctaattactgtttagcatgtagcggctagcagctagaactagactgctaatctatcataacaacaaattttagttgtcggtttggtgctagtacctagctttgtatttgtcaagggtcagaaccaggtgatacttgtgttgcaaaaaggataactgctatggaaactgggacagcaagtgaagcatcaagcactagttctacctagcacataatactaccacacgacttcttaagcaccaactttgtgttatctcatatgcatatgaacaattgcagttaaaccgccctgattgcaactgttccaaactagagaatgagagaacaaaataatcacctaataagaccttaagatcacagaatcacgccatcgtagaaacaaggaggtttttacctgtgtgccattaaaaaagataacccctgcccctgtgccactaaaaagttcgagcctccctctatgccatcgtcgaactttatcgcgcccntcacaccactccgttcgtttttggtcctaacggtgtgtgaccgcgcagccaaatgacttatttgcccttagagagataggggagagtgtgaa

SEQ ID NO: 754 - DNA, 1999 bp, Oryza sativa
tggtgtggacgacgttgacggcgaggccgcggtcgcggaggagctcggcgagctggagcatcggggcgatccggctgcggaacaggaacgggaacatcgatgcggcggcggcgagctccggaggcgccgtcaacgagcgcgagcgacgtgggcgggcaccatgacatgagaggaagaagaagaacaaattaagagagattgacaagtgggtccatggataaacttgtctttaactaaagtttctctctccgttttcatcggaaataataaaataatgttgttgatgtccgtcagctaattaccatattttttgagtgtccacgagcaaatagacgatcttcgggtgtctcacagcaaatgccgcaatattttgatgtcctatagcaaattttgtcttatatcattttgggggaaactattttgactctcgagggatgacctcttattttgttaaaaaccataaatggttatgaaaaattatgaaaaaaattgctaacattcatatcacatatctatacacgtcataaatcataaatcataaaaatctcaagtccaaattcaactcaacgtcaatatgtagaaaagacaaattaagcatataaaaagtaacatattgtacgcatctaaatttgttttttttctcaatgtgtaggtagaatttggacttcattttttgtggactaatagataccactgtactctacatcgttccttcctagtcaagcagctttgaaggctggctgattccagcccgtataggacatgagcccaatttgctcctttgaaagcgcaatgaattttttgttgggcctaggcctatgccaaccgtcctaccatcactacagctactttgcactaatcttgcgacaacacggtgaaaggaaaaaaaaagagtatcttttatatttatcgggtgatttctcataaaaaatcacccaaatcttttttacccttgtatttacatacaatggactacaaaagaaaaataacaaatacatattaacttacacattatttttaccaaaattacagtacacttacatgtcaaatcaactaaatttacaaatgtaattttagttatataagactgtaattttatattttaaagaaaataataattacatatttacttacatattatttttatcaaaattacaggacacttacatgtcaaatcaactaaatttacaaacgtaattttagttatataggactataattttatattttaaagaaaataataagtacatatttacttacatattatttttatcaaaattacagtgcacttacatgtcaaatcaactaaatttacaaatataattttagttatataggactgtaattttatattttaaagaatttaataagtacatatttacttacccattatttttatcaaaattacagtcacttacatgtcaaatcaactaaatttacaaatgtaattttagttatataggactgtaattttattttatttttattttttattttagtttcaaatgtcttaatttttcaatggtaaaagaaatcaatttttatttagatgtttaagatatgttaaattttttgtatcgattagtacttaatttgacatgtaaattaacatcgagatatttcttaatttgacatatgaaaattacatacttcacgtattttattcacacggcaagactaacacaccttgactccctgtcgacctcatccacgggaattgctgcacaaatcttggcgcaaagatcatgtggccaaaaaaagtcaaatgccacgaaaaaaatcacgcgggagatgtttagcaaaatcgaaaaaaaaggaggaaaaagtacaccccaaggtccctcgacttgttatcgagttacaaaatcgtccccaaccataaaaccagatatataagattcctcaacttacaaaaccattcactttaggtcatttggtcattttgacccagattttatccgacgtagtggctgtttcagcatgggtcccacacgtccgg

SEQ ID NO: 755 - DNA, 1999 bp, Oryza sativa
  misc_feature (1720)..(1720): n = any nucleotide
  misc_feature (1939)..(1939): n = any nucleotide
  misc_feature (1972)..(1972): n = any nucleotide
gtgggataaaacgagttactgggatcgatcggcgccgaagcgcagcgcacggaccgagctaggagtagaggcaggcgggcatacctggccccatcggaaaccggcggcgagggcgccgtcgatctggccggagctgaagtttcccgctgccgtcgccgagactacgcccgccggatcgagagccggctgctcgccattggacgtcgggaagcggcgccctcgacggaggtcgggaggggatcgatgaagtatgaggtccagttcgcatctgggctgctttttttttttcaaaacaacggttcatggttattcatttatgcttttctttttcctgtttgacttgtgatctgttaagagtgcacatcgctccttccattaaaaaaaactatttgtgacttgtaatcggaggatgtgtcatatttagaattaaattttaaaaaactgttcattgaaatttttttagaatatttgagatgcacaattttttacgaaaatatactgtcgatctcgtacaaccgttgtgcgaaaatgatgtgagcgtgacgtcgcggatggtcacaaagtaaaagtgtgagaccgtgcggtcttatggaacgaaagtgaaccaaacagcgataccggtgtcatgccgatttaattagtaattaattatcctgattagtcaattaactaattattaattagtcgctaattaggataattaatcacttttattattagttaatagttaattaggtagttaatcactaatcaaatggagccgttagacggtgtcgctgattggttcagcgagactgttccgttccgcgagaccgcgcaataccgtccgcgacgtcacatctatgtcattttcgcgtaatggttgtgcgagatcgacggtatatttctaaaaaaaaacttggatgaacagtatattttcaaatttaattcgtcgtatttgtactaggtttttttacatgatggagaggttatgttgtatggagtaatggaataatgctacattcatcttgaaatataaattataaatatattttaactctaaatttagacaagcgctcatcaagattcgaagttagagatattttagtggtatggatatcaccactagcattgttttcaaatgtgttaggcaacttcggcttagttcttttttaaacattagcccataatttttctctcaaaccttgctatacatatgatttttgcctcatccaaatagttttgatcatgagttgacttgtactaatatattgacgtgtaattcttttgtgtgtttgtgaaaaagagttgacttataattttctttgggctgcattccaacctatgtttggaataaactgatatgttccacacgaaacaaggtaggaggttattagtgaataattaattagatattaacaattataaaattgaaaatgagtatatttcattttttaaaataaacttatatgtaaaaaggttttgcaaacacacaccatttaataatttggaaaacgtgatcacgataaatgatagaattgcaaaagctaaacgaactttcgaactgagcctatattgcccttatttcatacttatatgctagcctatttgggaaaacaaaattctcaatgcgaaaaaaaaacactcatttgcatgatagaattatttgatcacaaatttgacaactgaaatttaaatttttaaataaatttcagaccaaaattgatggaatgcagacaanattgccaccaaaagatcaccaattgatggcgatctgcgaggccgtgcgggtcacggagcgcgtctgtgggaggagaggcgggcctcacgggtgcggcgggtggtgaagagctcggaggcgctcgtcatggcgggtgggggagggtgtggcacacgtggcgcggtggcgatggtgcgagactgcgagctcctgtctcctaccggatgcagcgatggcganggcacagccacggaagcctcagcgcggagatgncggcgacagtgggggtacggcgcagag

SEQ ID NO: 756 - DNA, 2000 bp, Oryza sativa
ttggatacagaaacttatatttgcacttaaaataggacggagggattacctactacacattggtgaacatttgtaccacacatatgtgagcgtgttcacgagaaagtttgtgtacgccgctgactttggtgtgccaacgtgacagcatccatccccgtacctgaaaccctgttcctggtcagagtcagccgccgattgacggtctctgcaccacgtggacgacgtgcgccgtcgacgtcgtacgcgacacccccctcgacggcgacacggccacccacaaccacctccaccaccgtagtccgtagtcatcatcatgccgtcacatacgcggccacgccgccgtgtggcgcctttcccctcgcggcgagagcggccgggcgcccgggccggcacgtttgctgtgcgcgcgcgggcaccgccacggcgcacccgaaaccgaaagcaacccacgcctcgccacggtttcgtcgataaaattaattctgtttattttccaaacaaaaaatttttcaccccgtcatatcgaatgtttaaacacatatataaataaagtaattagatatgaaaaaaaactgcttcctccgtttcacaatgtaagactttctagcattgctcacatttatatagatactactacctccgtcccataaaaaatgaatttttagctttaaacctttgtcccataaaaattgtatttctactaatgtgggacccaataaactgattgcatttccttgtaatcttctttccttccatcttatttctaacccattgtcatgacattccttttaatcaagtttatatatggaatgtgtgcatgtactgtgttcattaaatagggatattttagtcatttgcctatccgaataatatgtccttaattctctagaaattcaatttttatgggacggaggtagtaatgaatctgtatatgaatgtattatatatatagattcattagcatctatatgaatgtgggcaatactagaaattcttacattgtgaaacgaaggaagtaattacacatattgtgtgtaaattgtgagacaaatcttttaaacctaattgcgccatgatttgataatgtggtactaccgtaaacatttactaacgactgattaattaggcttaataaattcatctcgtagtttccagacggaatctataaattgttttgttattagtctacgtttaatacttcaaatgtgtgtttgtatatccgatgtggtacgccaaaaattttcgtttgcgaactaaacatgcccttaggctatttccccaactttcttttttttgcgcatgcttttcaaactactaaacattgtgttttttttaaaaaaaattctatacaaaagttgctttaaaaatcgtattaatccattttttagaaaaaacaaatacttaattaatcatgtgttaatgagtagctccgatttacgtgcgggaggtattggttcccaacatcaaagaacaaacacgaccttaaatccaaatactatactttcatataaatataagtataatttatatataaattttaatataattctaagcagttagatttacttcaagttttatacaaacggggaagaaaaaaaactaacacgtaaggggatttggtcctccgaacttcacttcgcgaaaggttacatacaaattatgtactccctgtctagatacacggtgcttctaattctctctcatattgctatatttttaaaactaataagaactttataataacattataattatattatagtagtatttttttttaaaattatggatatagagagtcccatagagagtccgacttgtttctctctctttttgggcaagtcgcaatcattgccttgtcccgcaccccacccccaccccaaccccgcaagcaaataaaggaggaaaacccgctcttccgccgccgccgccgccgccgcagagtccctcttccgccgccgccgtcgccggagccctaaccctagggcggagggatggcgcgg

SEQ ID NO: 757 - DNA, 2000 bp, Oryza sativa
aggtctcttccgaaactgttggagtataattggttagttaaagagctatagcaaacataatatactagggatatatatatatgccaaaaataatgaatataatgctttatctatttctgagctggtgtatcccactgcagttggccatttttactttgtgggaagtgaatatatcgcagtagctcatctttcaaacaaaattattgctaacgctaaaaaacattcaatgctaataacaggctactcaaaaggaaaggccttctaactaaaaattacatgactggatatttctctttttctgtaaacatagaaaacaaaaggtagcctaattttgtgacgggaaatggaatattgtgtcattttggataaaaattattgtgtatttacccccaaagtatatgtttctgtttatctgcttaaactaaattacacatcaaaacttcatacttgctcagcttaagatcgtagcttgattcatatctaagacaattgaatcactttgttatgtacatgccatccattgctcacaaaatactgccatagtgagcagagcatctgagaataagcaaacctgatggcctgtcaaccttgttgagaaggagaattgggcgcaagccatacttcaaagcctttgaaagtacaaacttggtctgcgctaaaggtccctccccagcatcaacaaccaagaccgccccttcaaccattccaacaactctctcgacctgtcacataattggtgaggatcatgtcagataccatagaaaaatcatcatttcttcttgttcttaactgtatgaaattataaaagagtgctgagtgtgtacttcgccaccaaaatcagcgtgaccaggtgtatcaaccatgttgagttcgttctccttccaagagacagaagtgacctacacaaatagccgagacgaaaaaagtgagatgccacataaaaagttaccatactgaatgctatgcagctattggaccatcaatgaagaagtttcaacaaaaaaaaaaatcagaaggatgagataatgattatctcagcagatcagatttcgggagtgatttattgaactacaatagatgtgcaggctttacggagtacagaatgagcagagcagttgaaccataagtgacataaatcctcccagaaatttacttacgcactgaaatctgccaaggtgctcagcgatgtataacagggaaaacagtagcgcaagtttgagaatggcctttgaagcagatctcacttccttccccaagccaacattctaatccctcacgtgatgcacgcagtatgttcgacggaatggacatttaacctctcgtgtgccctcactaaccacgcggcgcgcgcgagtggtggaaggtgggttaccttggaggcaatggtgatgccgcgctcgcgctcgaggctgatggagtccatggcgcgctcgtgtgggatgtcggcgccgcactgccgcaggagccggtccatcagcgtcgtcttcccgtggtcgacgtgggctatcaccgccacgttgcggatgcgggacgggtcgagggcgcctccgggccccagggccggggaggcggctgccgacgcggcggcggccgagtagaggcggcggaggagcggcgagacgtagggcgccggggacgaggcggaggtcgggaagacagggctcgtccggctcgccgccgagcggaggccgcggagcagcatgcccgtggccatggcgttcgcggcggcggcggcggcggtggcgtgatatttcgcgcggccgggagaaagggaggcggctgcggccaagggttttattcgggcgtgtcactgcgacagtttaccaaatgtataaaagcccatctgaccacaggcctgggtagtttgtcctgggcttctttcggcccaatctctctcccgtcgagccggccgcctccgccgctggggcgttccacttcccgacgggcgcaggcggccggcgtcgactctctcctgtccaacaccatagttgtggcggccg

SEQ ID NO: 758 - DNA, 1644 bp, Oryza sativa
  misc_feature (13)..(13): k = guanine or thymine
  misc_feature (14)..(14): n = any nucleotide
  misc_feature (23)..(23): m = adenine or cytosine
  misc_feature (48)..(49): n = any nucleotide
  misc_feature (51)..(51): s = guanine or cytosine
  misc_feature (52)..(52): n = any nucleotide
  misc_feature (63)..(63): s = guanine or cytosine
  misc_feature (64)..(64): n = any nucleotide
  misc_feature (66)..(66): k = guanine or thymine
  misc_feature (67)..(67): n = any nucleotide
  misc_feature (164)..(165): n = any nucleotide
  misc_feature (168)..(168): n = any nucleotide
  misc_feature (173)..(173): n = any nucleotide
  misc_feature (176)..(200): n = any nucleotide
  misc_feature (1228)..(1228): w = adenine or thymine
gggaaagcggtgkncatggggamaaggcggtgggaagcggcgatggtnncsnttgggaacgcsngknggagaacgcggctatggcctgcggccgccggtagggagggaggggtacgagaggggagccgcccccgtggggggtcgaagttggcgtcgcttccacnnccntcgcngcnnnnnnnnnnnnnnnnnnnnnnnnnccgaccgccaccgccgccgccgccatcgtcatcttggcctcttcatcgtccttgtcgatcgacattttcatggcgtgcttcgtgttcatacccttcccatggattatttcgtcgagggacacattgattggctccccccatcttctcgccgtcctttgacagccccaattggtgatttggctcacaaactcctagattgtctggaggaagaaaatgaacagtgcactcacaaggtgttcgacagagggagttttggtgatgtgtgtcactggctcactgcagcttttcgttttctcatccttttatttgcagaatacaaagactcaccatgcatcgtggcctcgctgccattgccgcgaatgtgttccatcccacacgagcgaagcggagcgcacgacgcggatacgccgcgacatgaactaagcacgtccgaaggaatacgatgccaacagaaattgaaacctgatgcaatctactctaggatgctgctaaaaacaaggacacacacatgaccaccgtcggctacggcgacttcgtcccgccaacgacgctgccaagctgctcgcctgcaccttcgtcttcctaggcgtctccatcctagcttcctcagcaaggccgccgactagctacctcgtcgagaagcagaccagagcgctccacttccgcgcactgcacgcccgcggacagagcttaattctcgtcggccgacgctaggctatggctcgagcgacggctccggtggctggtgcttccctttggcgtgagctcccagctacgattctgcgcatgtgcaccgtacggaaaggctatacatcaggcactcgcggaccggagccgttggatgcgcaagcgacggatatcgggagtcgaacgtccctctgacgtagaggagccgattcccggccactgccaccgccgccgctcctgagagagataagggagaaagggagggaggatgacatatgggtcccacatgtcagagggtcctactttttatgtgaatgatatgggttccacatatttttttwaattttgttcttattctaatgccacgtaagcgccacgtatgacaaagactcgatcaagcccgtcacgtaagcgccatgtcaaccaaaaccacctccaaaaccaccgagggatattgtttgcaccggttttgatacttggaggagtcgatatacccgtttttatggttggaggacatgaattatactcgggccatagttgagggagtcaaagtatactttttccgcccaaaaaacgcactaactttctaagcccattaggcccataagttcggcctggtatatgcgagcgcgagatctccagagtaaacggcccataaaaagtagcattcgacgccgccgctcgtcatccgaagccgagccgcgacgagggaggaagaagcatctggaggcgcacgcacctcaccctccctcctccc

SEQ ID NO: 759 - DNA, 2000 bp, Oryza sativa
  misc_feature (199)..(199): s = guanine or cytosine
  misc_feature (262)..(262): r = adenine or guanine
  misc_feature (271)..(271): s = guanine or cytosine
  misc_feature (322)..(322): y = cytosine or thymine
  misc_feature (324)..(324): s = guanine or cytosine
  misc_feature (416)..(416): r = adenine or guanine
  misc_feature (439)..(439): r = adenine or guanine
  misc_feature (639)..(639): n = any nucleotide
  misc_feature (756)..(756): n = any nucleotide
  misc_feature (763)..(763): n = any nucleotide
  misc_feature (765)..(765): n = any nucleotide
  misc_feature (767)..(767): n = any nucleotide
  misc_feature (769)..(770): n = any nucleotide
  misc_feature (778)..(778): n = any nucleotide
  misc_feature (781)..(781): n = any nucleotide
  misc_feature (796)..(799): n = any nucleotide
  misc_feature (801)..(802): n = any nucleotide
  misc_feature (804)..(804): n = any nucleotide
  misc_feature (807)..(807): n = any nucleotide
  misc_feature (816)..(816): n = any nucleotide
  misc_feature (818)..(818): n = any nucleotide
  misc_feature (820)..(820): n = any nucleotide
  misc_feature (826)..(826): n = any nucleotide
  misc_feature (831)..(831): n = any nucleotide
  misc_feature (833)..(833): n = any nucleotide
  misc_feature (843)..(843): n = any nucleotide
  misc_feature (846)..(846): n = any nucleotide
  misc_feature (848)..(848): n = any nucleotide
  misc_feature (858)..(858): n = any nucleotide
  misc_feature (862)..(862): n = any nucleotide
  misc_feature (1030)..(1030): n = any nucleotide
  misc_feature (1420)..(1421): n = any nucleotide
aggacccatatgtcaagatgcccacgtcatcaccctctctctcactcctcttctctgggcaaccgggaaagccggccggcgaggcgggagaggaggcggtggctgctgcaacgcggctgaaggcgagggcggcggccggtcgcgaatggtgtcgacagcgatgtgtggccgccggcgacgaagcggccccgcacgggcsggcgccgcggcgttggccacggagttgaagccggggaaaggcgccgcggcggtggccgcggargtggagccstggaggcggggtcgagcaccgtggagctggactcggagccccggcctgctytsgcgccgcatcctccctttctcagcgtcgggagcgtcgtcgtcgtcgtcgggcggcttgtctgggcaagccggccggcgctgctagggaggargccgctggggcgaagcgggaaarggggccgcggcggcgtctacggcgctgtgtcgcagccagcggcgaagcggccccgcgccggcgggcgccacggcgttgggcgacgaggagaacggcggagcaggcgagcaaggcgggcagcgacctcgctctcgcgtgcggcgtcggcgtcgtcttcatcctccgcagcgagctcccaggcgacgaggctgctcatcacncggaggcgctcggcgtcgccgcgacgaggctgctcatcaccctatcagcgcacatggggcacaccatcgccgagaggctctgcaagacgcagggccagccgaggagcgccggcttgncgccgcngncngnngatgaganccnacgccagcggaggannnntnngnggngcggagggncncnctgctncgggngntggtcgtggncgngncatgtgaaangatnttttagctcgccattaaggaataaagtaagaaacgcgtactctctatataaaatgagtacgttcaccgacgtgaaaggaatttttagctcgtcattaagagcttaagaaagttacttggaattctttggtttgttgacaatcacgattcatgacaaagaagattgagngcctacgggtgcacgccagcgcgctgctctcactgtcgtcacccgcgtggccacgtcgatggcaccgacgtcgtcgtcgacgccggcgggcagcagggcgctggcggcgaggggtgttcgagtgcaagacgtgcaacaagtcgttcccgtcgctccaggggctgggcgggcaccggacaagccacacgcggctgcaggcgaagctgctgagcgaccccgccgccgcagcggccgagagggacagggcacgcatccacgagtgcgccgcgtgcgcggggtcgagttctccatggggcaggcgctcggcggccacatgcgccggcacaggggcgagacgggcacgacgaccgtcgtgctcacggccgccgacgtcgacgactcgggcggcgnnaccgtgccgcagtccgccggaggccatgctggacctgaactacccgccgccagtggcagttcctccctcgccggccgctgcccgcgcccgccgctcggccgcgcccatctgctctctgccagccgcctgtggtccgtggagaggggaggagagagaggaagagagatggtgaggggagggaggaagaggctgacatgtgggacccacgtgggtcccacgctgattggctgccacgtcagacaaaactagagtcaaagttacactggttttataaattggggtacgtgttgtatcgggacgattttgtaactcggtgacaagttgagggacctccggtgtactttttccttaggggaatgcctaaggtctaagccattgctaaaggctaatcttcgatgtcatcaaattaaagcccatgggccatggatataggaggacttttggcccactcggccagcttccgctgcggccctgcctgcctgcctcttgaaccgcgtggcgccgccgccgccgccgggattcacaaaaccaacggagcatacggactagaatcttcgccgctcgccgccgcggggacca

SEQ ID NO: 760 - DNA, 1999 bp, Oryza sativa
  misc_feature (126)..(126): m = adenine or cytosine
  misc_feature (192)..(192): k = guanine or thymine
  misc_feature (219)..(219): n = any nucleotide
  misc_feature (1148)..(1148): n = any nucleotide
  misc_feature (1456)..(1456): k = guanine or thymine
agggggcggccgccgcccgacctcgggcccgatcccccctcggggggggagccacgtggcgcctggggcggccttctccctctagtctcggccagagagtggccgccgccctacctcgggcccgamccccctcgggggagggtcacgtggcattggagggcaacctcctccaactagtctttgggtaaggaktggccgccaccccacctcgggtctgantcccctcgggagagggccacgtggcatcggggggcagcctcctctctctaaacctgataccccgggcccatatcaccgacaagtgtaattacactataaatatatgtattttataatgtaataaaaaatatcgctctttttatttataatgtaataaaaaatatcgctcttcttgaaaaatatgatgttataactataactaatcaccttttttaaaagcaacacttatatagaatttttttaaaaaagcacgacaagatgcacatgaaaaaaaaaagagcaaatagaaactaggaaaatgcagtatagaacgcaacgtaagttatgctcgcctccaaatcgcttttataacctttttcttgtttaccttgccggtgctaatttcttttgctttacattttcaacaaactttgccttctacattatctcatcatctagacaacagggaaaccaaaatcaaactttattttttttttggtttttgctacacacaacaatttcctcccaaaccaaaaacccggaaaaatcagaaatccatgtgctcgatgacacaaatactagggatggtctccttaaaaagaacaacatttgcaataaaaccctcacacttgtccaaccttaccaacaagccaccaagaaaagatacgcaaaaaacaaaaaaaacgcattttttttcacctaccagcccagccgccaccttctcctctccccctttatactcgccggagcggagactcccctctccttcccttgtgatctccgaattcccatatcagattccgagggcttggggctctcctacgatcccccgcctcctcctcctcctccatacggtatatctctcggcggcatctcgaaatcctcatccgtttctgttgttgtttccgcggcgagtttgaggggtgtgtgttcttggagaggaagaaccngttcgccggtttgattcagggtacaggaacttgctacagagtgattggtgggtggataaggtgagatcttttcttctcttgatcctacaaagttgaggttgtttttttttttaagtttatttttaaatttctcttttcaatctgcggcgatgccgccgccgccgccacgtttgttcctcccctcgccgcgagggcgcgaggcttgagactggcgtcttcattcatgcatccattttgtttttgtgttgttgttgttgggtattttgatccaagaaagaagtcttcattcaatctgggttggggttgtkgtaaagatgggtgatttgcatgcgaaatctgccgggctagatcacgggagttggagaagcttggtatctttacgtgtagatcactcggcgaaaacgatgtgataatttgtccccatctatgattttgtaggcttgtagtttctgtgatttggggatttatttggtgacggttctgccgtgcaggtattgtgtactactagtactttccgctgagtaatttgggaggaaaactaaaaaagatggttgttgggtcatacatacatggtcgattcattcattggtttgatcagttcaagagaaatatttttgggagccatctcaaaagaatgatgtgtaaaatttacttaaccagctcattgaggaaagttgttccatgtcactttcttttctggtgctgatagatcaattgctctactgaggtcctcaaagaaagtttttgttgaaaggaaatggcctgttttgttttatttgatgacagatgatgctttaaattgtttcctacctgttgtcatgtacaattttgttctttgatttgcagaagcc

SEQ ID NO: 761 - DNA, 1999 bp, Oryza sativa
  misc_feature (1)..(109): n = any nucleotide
  misc_feature (1725)..(1725): n = any nucleotide
nnnnnnnnnnnnnnnnnnnnnnnnnnnnnnnnnnnnnnnnnnnnnnnnnnnnnnnnnnnnnnnnnnnnnnnnnnnnnnnnnnnnnnnnnnnnnnnnnnnnnnnnnnnnnatgataaagagctactccctccgtcccaaaatataagcatttttaactataaatttggacaaaagtggcggaggtaatagctaaaaaattgttatattttggacggagataatagctaactagtgcagcgcttaatatcaaaattggataaacctaattatagactctgaatatgaatagatccatcctactataatgatttggacataaaagttcatatttgttatatctagattcattgaagtaggaagggtctaatcctatcctagttaattagtttataatattttagaacagatagagtatatggtaataatgtatatgcgcacgtgcatatgagttgcatgaactccctccctttttataagacatataacgctggtgactcttgtatatatatgttttgaattatgtatcttattttaaaaactatataagtatataatatcatttttagtttgttgtgatatgtttttatattttgatacttaaaacatgattttatattgtgcacatttacactaaatttttaataatataaaagtaaaattaaatgtgtgcttgaagattaacaacgtaacaacgtagtatgtttagaaactgagggagtatatatatcgtgtaagcaagcatgcatgcaattaagctagcttattaataagtagctttaggtagctaactttgtggatctgttatgtgttcctctccgtttataggaaaagagaaaaggtgagcggcgcctaattttgccatctcccgccaaacatatcatgagactaaccccgcccaagatgcgcccaaccatgcacatatatatctattactactatccgtctcaaatatgagtaacttctacttataatttcgaatgcgtagccaaaaattatcacattttagaacaaaggaactacggacatttgcctagatgcgttcaggtttgcaactgtaagcttatagctaaaagcacgtaaagatggatgcgtatttcatataatgccttttcaggttggaaaaagcaaccatctgacatgaatttttcctgacgtgatcactaatacgtactcctaggtttatgggtggcgagagccgattatcggtcaccacgtctctctggcttcaaagcaatgagaggatctcgatccttttaggctagctacaaagcaatgagaggctgctgggccatcatactagtagtatcagatacttcctccgtcaaaaaaaagaaaaaactcaatctgagaggggtctaggacaataaatctagacaaagtatagttcagatacattatattaggaggggtcacaggttaaattttttttggatggagagagtactaatcgtattaattgatcaacaggctaggccagccaaacaaaaatatagtactaatattttgctttattatttgattgattgatcacttgttggatgggaaacatcaaacatgatgcatgtgaagcactgggagcaactagcctactcctacttgtacatacttgcttttttttttttctcttttccttctcttttcaaaggggaaccagtgtggtaacactttaattgcgcctagagaagaaacaaatgtaaataggcctgctaccagtatgggccaganataaggatgggcccaatgaataaaaatggaagcccacgtcggcgtggacagcccaagcaagaaaaggagaggagaaggcgcacgcggcccaaacacgcaaagtaaagtgcagaaagaagcagagctcgcgtgtcgtcgtgtcctctcctcgttgatcgatctcgaggagttcatcttcttcttcccccttcgcctactcgcctctcctgccgcaaattccaattccaattccaatcccgcttgggcgagcgatccaccctctgcttcggctgcc

SEQ ID NO: 762 - DNA, 1999 bp, Oryza sativa
  misc_feature (316)..(317): n = any nucleotide
  misc_feature (833)..(833): n = any nucleotide
  misc_feature (1309)..(1314): n = any nucleotide
  misc_feature (1355)..(1357): n = any nucleotide
  misc_feature (1451)..(1452): n = any nucleotide
  misc_feature (1510)..(1512): n = any nucleotide
  misc_feature (1663)..(1663): s = guanine or cytosine
  misc_feature (1709)..(1709): s = guanine or cytosine
  misc_feature (1712)..(1712): r = adenine or guanine
  misc_feature (1764)..(1764): r = adenine or guanine
  misc_feature (1766)..(1766): r = adenine or guanine
  misc_feature (1767)..(1767): m = adenine or cytosine
  misc_feature (1771)..(1771): s = guanine or cytosine
  misc_feature (1803)..(1803): r = adenine or guanine
  misc_feature (1810)..(1810): m = adenine or cytosine
  misc_feature (1858)..(1858): k = guanine or thymine
tccgcctaaaggccaaagccgccccaatccgctcggcaccgaactgcatcgttgtggcagctcaatccaccgttggggagctcgatctgctatcggcgtcgactgattcgccacccaacgccgacgacggctggaccgagctcaggggaggtggatctgtcgtcggcaagctcagagaaggccgatccatcgccagcgagttcgggggagttggatccatcgccggtgggctcggtggagggacaaggagggggagcggcggagagggagtggcgccgtcggtgggtggtcgaggagggagagcagcagatgagannagagaaaaccaagaggaaagagcagaaaaaggaagacggcggattcatcgagagcagctgagcaggaggagaagtggggaaagtgatggggagcggtttttttacatgtccctgccagtgtctaagagagtgagatgggaggataagaacagagtatcgtgtatagagataaattgagaatggaagaaccgagaggtccgagactgctctgctgctgctttcttatcccttccctgtcactctgcttccatagttttaatttctgttttttttctctacgtctaatctgcttcttatttttttcgatatttgacaatgtgatttataaatggaaaacaatactcccattgaaaaaataataacactgattttcataatttggctatgccattagctttcataattatgatatatagtttaatttttacgtcaacacaaatttaatttagtttttatctattgcaacacgaggcaactatgtggatccacggatattgtgtgtggtgcataatgcanacaatatacgaacaataacggataattcaaaaatcaataattttaagtaagtaattattttctttccgtcatccgcaaaacacgatatattacagtccaagcaccatctcaattttgtaaataatatcatgcgcttgccatgtgagagttgatagagagcgcgttatgacaatatgagtatatcaaaatgggacagtgttttatatccgttcttgaaatatttattacatttaaacgttctttttacccgtagcgaagcacgggcattttactagtaaatcgaaaatatatacacactaggtgcagttttatgccttcctcggttcgtccaagtatccaacaatcggtccaactgaatttaccttgcacaggacagcaaaatgcacggctactgaacatcagtacatacttacatggcaacagccaacagattacatatagaatcagttacaatctttcaatttttcataaggcgnnnnnnaattggcaatggaccaatggtgttggcgtgttgctgctgcnnncctgatggctgtgcctcagcgcctcgcgcggaagaggaagcccgccgtggatggctgatgcgtcggcgtgggcgacggacgacaacgcggcgcnnatgcggtctgcggctgtggctgcgggatgaatgcgcgatgtgattttgcgtgagcgtnnngacgtgggcggcggctaacgcgcgtcaatcggaaaccctcgcgtcttctgttccgcctcagcgtctcatcgtctgcatggcctgttgggccaaccacggcagggggtggcctgggggtggggtggggcccctacgatacgggggcccggascggccgcactgctcgtcccccgtcagggccggccctgccgtcgagscgraggaggacgtcgccagcttctgcgccagagtgaacgccctccagggaaagargrmggcsgccgcgcgcgcgctcgcgtgtcgccatagcgrtgacgamgtcgtcgagaccgaagaggaagttggcagcgatgaggacgacgcgttkacagaggaaggctttcagccacatcatcggcttagccgaagagctccttgaggacgacgacgagacgagctcgagctaggcccggttcatggacgccgcatagttgctgtgctctataagcttcacgtgcagtgcagtctt

SEQ ID NO: 763 - DNA, 1999 bp, Oryza sativa
tggaaaatggagtcgaattcggacgtgagtctaaattcggaaagattgataaatataagggcctattcactttgctaccaaaaaaacattaccaaaatttggcattgccaaaattttagcatagttgtcaaaaatttggtaacttgccaaaattttggcatgatttcttatatagttaccaaaatttggtaacaaactaaatgtagccatttttttggcaactttaccaaaatttggtaaggttgaaaatggcatcaaagtgaacaggccctaagagatgagttagatacttgcaagagagggtttcctacgtggatgggaatcctaattaatgttagattcgtgagctttgtacaacattcctcatgtataaatagaaagggagggtgaggcatcccggtatcgatttttgagagagttgaattgagagaaatgttagagttctgagtctagtcgagattttggtgaggagtgttgttggtgcactttgtaaacactagttgatgcaataaagttgagatagttcaatctacatcttctagtttttatctacctgtgttttctaggtcccgacggtcagaccgacagcaaggtgacgttctaaccgacgagagtgcggtggtctaactgcaggtggcgcggtggtctgaccggccagacaatggaagtctgaccggcagcacgagggcggttcgaccgacgccttcaggacttcgtcgcctacttcatttgaggcaaatcttttattccgcaaaatattttgggtttttggttttccctaccattcacccctctctgataggtttgtttagtcttgttcgatcatatacctccatttttatttacatgggcagcgtaaaaaaaagagggagtataaatgtagcaatgaccaccccaaaaaaaaagacattaaccataacaggaaatacacaattatgtatattaagaatgttaaaaatgacaactgcaaataagatctcgatgaatagtttaggcacatgaaaactataaaatgtagcaatggcaccctgccctcacgacaaaaaataattataaattatatacagcattagggtggcctgttgaccaaattatctatgcaatgcttttagtttgatttgatacttatcgcatatgtggttaacctctaatttttcttacttcgtaggtttcaatttgccccacttgtgccggagagggtggagtcatttcagagtatcgcaaagaaatgtgctggagagggcgtgttcatgttggcaaggagatcaaagtaaaagttcctctaggtgttaggattccatcggatggctgattgagccgggagcgtttcagccgaagcccataggatggctgattcgactgagcccattcagcaaaacaaagtgggctcacaatggagggtaactggcgtttggttgatcaaggtggatattttccgtttcagttttactatatatttatggacaagttttctctcaaaaaattatgaaatgtaaataccctattgattataatttaattattatattataacttgtatgtaattttcatattataatatcaaattattaaatttgcttcaaggttcttgcaaacgtaagaggagaaaatcactgtgcgtgcacggggtgaggggattcgatatcacgacctccgctttgcaggaatcagcatgttacgacggaatttacgaaagttatatacaggatatattgaattacatgcatgattacatactacgactgtactatatttctgcccgaaaatttctctacaaaagcataaacagtcccgctgaactactactcctgtaacctgataggcccaattcaggcccacgaacgtgtttgggccgaaatgtgaacttgaacaggcctggattgaggcccaatacaactatgggcctaggtggaggcctcctgaacacaaaagaaagggaaaaaacccaagtgagaaaccctaaccgcgcgaggcgcctctcctcctctgcttgcctgcc

SEQ ID NO: 764 - DNA, 2000 bp, Oryza sativa
gagaagatggcaaaaagtaaattcataggaaaaattaaggtaagaataattttaaaaaataaaatgttacatgcaattctaaaaacaaaatctggtctaatttaacctagcaaattttacatcatggagtctaggacaatatttttttagttatcagacagatcccacagttggagttataaatttttaagccactatacaatattacctattttaggtgttcattaagactgtaagtgacgagggaaggattgaaatcactaattaagggatcacaatgtgtgaatttttttgttacaaatttcattggcataaaactaattctgaataaacaggaaagattatggacatacagagaagctcaccatggtgacagaccataaatcagtcggcgcgctgattttatagtacggcttattgccaaccgatgggtaccttcatccaagccacgcgatctggttcgtccgcttgcatagtaccacgtcgccccgtcgtcgtggccattcatcaaccgcaggattccagcgacccgccccacgcaacggtggtccaaggccctgccggtagaggcggccccacctgtcggcgatacggtccgtgcgctttgcggacgcgggcgagcaggtgtcacattcttctcaacgcctccgcgagcttactgcgtgtgctccctagctactaccccgtcccgttgattccagaacgttccaccacctcccggatgcactgctccagccacagctccctgcccaaccgtgtggccacacccagaatttctgggccagaaacataggatcagcctactgcgaggtttttaccggttcagagcaggtacaatagcaggcttaagaaagagaaagaaaagcagcgggctacagatttatagtcagctacagcacggactccaagacgtcatgtgtgtatgagatgtgggaccaagtattaatagtatagtaaacaactattgtatgaattgactattacgttggctatagttgatttggagctagtagttggctatactattaaacttcctctaagagaacactagttggcagggattgatatggaataatggtatgcatttactaattatcactaaccaaattttacaaaagttctagatactatgttgtctcaaaatgttgctactaggatgattcttagatgtaatattttgagactaaagtgtttgaaaagtccttatcaccaaatgattaaaatttatgacttacaataaataagtggatacattttctaatatactcccttcaactctaatcgacaacgtcctaacatcaaatactccctccgtttcaaaatgtttgacaccgttgacttttcagtacgtgtttgaccacatatttttttaataagacgaacggtcaaacatgtgctaaaaaatcaactgtgtcaaatattttgaaacggagggagtactacttttattgaccggagcaaatatcttttcttatcttatatcataataaataaaaattgaagctaaatttaaattatctgattataaatatatgtcacaacatggtattggtaaaaaaaaatgatacttgtaaaagaaaaaaaatctcatgtacaagtatatcagataaaaattgatgtggtacgttgtgattgaatcttcatttcattttcacatagactaactagggtgatattatttgtaacatgtgtagcattactctaatctaagtattattactggagtgatatgaactgaagtgatttaccaccacaaccatagtaaaaatccaagggaagaaagaagaggccacaggctggcctccaaagtgtggtggccacacgcgaagtctataaaaccctccctccccttccttatccttcccccaacctctcgccatttctcccccaatctctcaaaaaacccaccactcgaatccaccacgaccttctccttcctccctccctcccctagggtttcgtgacctagctagcaccagcggtctctctcggtggccatg

SEQ ID NO: 765 - DNA, 2000 bp, Oryza sativa
  misc_feature (393)..(393): y = cytosine or thymine
  misc_feature (1821)..(1821): n = any nucleotide
taaagagctttgatgtttcaccacaataccgggcaaggtcaaaaagaatggctctcacgaaaacagttgagaaacagctggatttttcatcagatggattagatacttgtggttctgagattctgaactcttcctgcaataattcccaaagcacactttctattaccgaagccccaaaactgaaagaaaaggaacatgctgttcaattggaaaatttaaccaagaactttgcgcatacaaccaatttggatgtaacctaatcttggaaaatgcaggtatgctgttacaaaaatcttgaaaacccctgctttacaattgagatgcattatacttttcatagccagtctacaaattctacctggtttatctgatccatgttggtagttgggtccytttattaattgatttgaacatggaagaagtgtgcataattgttttaccattgccttgtaggaactgacatcaatctgatgaagtaggacagatgagctgaagtgtctttctgagctgatgagctttttctcaaagtatcacgattaaaccacaacaagatcaaacaaaaccggtggagaagaattccagaattgaagctttgtactgagtacagaaggtccaccaatcattctcccatctcttctaaccaaggtgtacaaaagatgagcgacactctgtagaagaatacattgctcgctgcactttgtgaatttacagttagaaaattcagattgtagaagccacaggtgtgtacaaaacaacaacgaaaaaaaattatagtgttagaacgtcattatagctgaataagagtattcctcattggattgtcagatttattttgtcttgtgctttccctttgtcgcgaaacagccagggtctgctctgtgtaacaataataaaacccgtttttgcaaaatcattgccagagatagtcaagaaaccattttgacagcagctcaggtttcgtttgttggttgttgacaattccttaaattctttagcatcttctgtactcgctgaagctctgttagaacaacgttgcagaggctaatcatatgcttgtgttcgttcttacttgatgctagttgtatgatatgattcagctgtattactggccctgtttgggtgagcttaatttagagaaactggaatatgtttctagattctaattctatatctatagtaactatacatatcagaatatgtatgaaaaattagactatgtaagaagggtgtgttcacactaaaattggaagtttggttaaaattggaacgatgtgatggaaaaattggaagtttgtgtgtgtaagagttttgatgtgatgaaaaagttgaaagtttgaagaaaaattttggaactaaactcggccgaagttttttgtttagagcatcaccaatgtatatggcaaagtgatctatatagatgggacccacataaatagtttatccctatgataatgtccacaatgtatagatacaaggtatcattaggagaaggagaagagagaggagtagagatagataatataatttatttcatatgggtagtccatatgtatatgggtattttttgctattttttttatatggactagttgcacaatgataataggtggctgaatggaatattctattgtttatagactacttttatattgtggatgcccttaggaaaagctaaacccctatcggcgcctttctatgcctctctatcaccttttggtcattcggttcatcgcggatcgacgagaaaccaggttggcccgaatcaatcggcgccggcggcctccgcggtttccgccttcgggtagcgcctgcggcatcaanaagcacacagccgaaaccgaagccttttctttcttccgccccaagaagctgtgccacgtgtttcctccttcccctcctcgatttaaccgccccatctcgagtccccccatcacagcttccactccacgaaaaccctctgcctccttcgctcgctgcaccctcgtctcggcgatccatcc

SEQ ID NO: 766 - DNA, 2000 bp, Oryza sativa
  misc_feature (1)..(99): n = any nucleotide
  misc_feature (187)..(187): n = any nucleotide
  misc_feature (192)..(192): w = adenine or thymine
  misc_feature (380)..(380): n = any nucleotide
  misc_feature (381)..(381): m = adenine or cytosine
  misc_feature (385)..(385): m = adenine or cytosine
nnnnnnnnnnnnnnnnnnnnnnnnnnnnnnnnnnnnnnnnnnnnnnnnnnnnnnnnnnnnnnnnnnnnnnnnnnnnnnnnnnnnnnnnnnnnnnnnnnnattgagggttgattagccaatagtgaagtgcatttgattcattgtagagctagtgtggcacttgatcatctccgagccaggtcattgnttgtwactcttggagtttgccgcctcctagatggcttgtggaggtgttgcctggtgacctctccaaggagattgtggagaaggcccggcgccggttgtgagtggtttgaagttcacaccttcggagtaaaggaagaactacccctagtaattaaggctcgggtagtccacttcgtgggtcggctcccaccttnmccamcccttgacaaagggggcttgcggtggcttcgtggttttgagcggtgaagttgggctcgcctcaatgggaagtaggaaaccggcgagtttccgaacctcaggtgaaaaactccttctctcttgtctcatttgcttattctatttatatttgtgcaatttactttcatagagacatatttaaacccatatcaccctacgattgcaaaacttatattatgtgtgcaatttactttcacatatacatatttgaggccgtatcaccctaggattacaaaacataacttagtttcttagttaaccttgtatctcaccaagcctaacaacttaggttagttttgagtatgtgtcatttagttttaaatcgcctattcacccccaactaggcgacatcacgatcctacaaggtgaaaaccataacctggttttttagaacgggcaacgacggcactcttggcatcgccacctccttggaggcgttgtttagaagattcattcgtgttgtgtgcctgttaggcttttcagtagcaggatcaagcgcagacgcgtggtgtggttgtattttccttttccttactatagtctcccagtaatgtagacctttttttcttgttatatatcaatataaacgtcataatatcttgtaccgatttcaccgtacatgaatgtcgcggttgctgtttttgatggtcgttgagacagatagtttggtactatcagatttcagttccgtagctcctggatcatgatagcatcagtttcatcatcagttggtctgcgatttcatcgtaggctaataaatagtacttcttcttcttctgtaccctaatatatataagagatttcgatattttgcttacactgtttgactactcatcttatttaaaaaatttgtgcaaatataaaaagtaatttagataataaaataaataaaaaaataaaaaataattctaaattttttttaaataagacaaatgataaatagtgcaagcaaaatatcagaacctcttctatcaggagagggaggaagtatgtgacatgttctagccttttggaaaggagaatctactgtttgacctgagcatctgaacagtgcgagccccaaaactgaagtcaacctggtgaatcttgggaagacaaatgatgccttttgccatggaaaaacatttcaaaagtccccaagaccgaagcagaaatggagatgctactactgctatttgtctctttggcctatttttagagcgctcatgtctttctgcctcaccgctgcctctgcctccttccaaatgcttcgccccccgagctctcctcggcgtgcgcggcgcagcgccatccaccccgacaactcctcccaacccccaacctatccaaacacattttcttgcccgcccctgcagctccctccaccgcgccacccatccatcgccagccatgcacaccctcgctctgacgaccctgtcacgttgagctacgctcggaggaggacgccacgacggcgaccgggaagaagatgaacccgctccctcccccggccagccggctgtgggaggcgagcatccgcaagctcaagtactccaccatcctccgcggctccgtcgtcccctccggcgccgccttcg

SEQ ID NO: 767 - DNA, 2000 bp, Oryza sativa
  misc_feature (933)..(935): n = any nucleotide
  misc_feature (961)..(963): n = any nucleotide
  misc_feature (968)..(970): n = any nucleotide
  misc_feature (976)..(980): n = any nucleotide
  misc_feature (982)..(982): n = any nucleotide
  misc_feature (1361)..(1362): n = any nucleotide
  misc_feature (1551)..(1551): n = any nucleotide
  misc_feature (1577)..(1577): n = any nucleotide
  misc_feature (1581)..(1582): n = any nucleotide
gggaacctggacaaacgaactgagccttagaagcagtagcggcatgcacgacgatggatagaaaaggagaggagggatctagccacactgcttggatctgctcgtgagcaccgaagctcgttgctcacgccctcctcgggagttgccatggcatgggaaagagaggatgtccacggcgacgatgacgacgaagcagcgacagtagaatctcatcggctacacgcgcctagatccgctcgcttaccccgaagctcgctacgcctgtggcctcctcggcggccatcatggcataggaagaggggccttccacggcaatggcgaagcaacaacaacaaaagttcgctagtcatctgctcgccgtccctaaagcttactacccatgcatggcttcctctgcaactaccatggcacaggaagagggtagatgggaaaggacgccgagagagatgcagcctgcaggggacgagagaaagaggagagagttgagagaaaagaaagagagaaggagaaagaagtggagacaaggacatgtggggccccacatgttgactcaatctgtttgattaggtcaataagccacgtcaataaaaattatcctcaaaacgattgagtgattcagtttggactagttttaatagatagaggattaaaatatttgatgttatagttaagggaataagggatatgattcgcattggacctatattggaaggtgtcaatggacttgtttccacaggcaaatgtgcgtgcagccgcatggcccgagcacaaaactgagctagcgagcccattaagatcaccaacccagttattttcatccatcgcacttctagattggacggaacctatatatataccggtggtggttgataatttgacatgacgaagttaaccaccattaaagcatcatcaacatattgaaaaaaaatcttnnnaaaaaagaaaaaaaacagacccacannntattnnntccatnnnnnantataacaacttatgattaaaaaccgaacatctataaaaatacatgtctcatgtctctaattgtcaggtatagctcgtcgataattttcattcgatgcaaattacattcatagttgttcataatacatttttatgaaagttattaaaggttaaattgtactgttggagatcgtgacattaacatgcactagaggaagtatatatgtacaagtaattatctttatcccttgcaacacgtgagtattatgatagttatattaaccatacgtattatctttgaaattgaaattttaggttcttgaattatatctaccatcatcttgtacacacatcaacgaccaaaatcatccatgttagatccaaaatggcatacatgggcnngcataaataataaaaatatcacaaaattctccgtataccactttgtagtttttatatttttctggaaaaagagtgtccttatctgccgtcgtagaaagtaatcctagacgacacttcacttaatcacttgttttttgtgggtggtattctacctcaagagtcattcatgctcgagtgtacgtcatgccntcatgacatcattcctcgttaattantcannctctaatcactttcttctttggctgactcaaaaaagaaaaacttcttttcgattcttttaatttctctcacactttgcgtttccaatagagaatgaatggccaaacaaactaaagtgaaactcgtcaaaaagaataaaaaaacaaaaataaacaccccaaaaaagattgtactgttggagtacaacacgagatgagccaaacgtgagggaaaaataaaagaaaaaaaaagaaaaaaaagggtgaaaatgaaaaaacgccaaaggccgaaagacaaccgtccgctttagtttctcgtcgtctcctcatttcgcacaaaagaaaatttatttattcatttatttattgttcgctccaaatgccaccgcttcgccttcgccttcgattcgccttctcccccccgaatccaaaccctctcaa

SEQ ID NO: 768 - DNA, 2000 bp, Oryza sativa
  misc_feature (1001)..(1001): n = any nucleotide
  misc_feature (1003)..(1003): n = any nucleotide
  misc_feature (1007)..(1010): n = any nucleotide
  misc_feature (1013)..(1013): n = any nucleotide
  misc_feature (1036)..(1036): n = any nucleotide
  misc_feature (1085)..(1085): r = adenine or guanine
  misc_feature (1086)..(1086): n = any nucleotide
  misc_feature (1129)..(1129): n = any nucleotide
  misc_feature (1146)..(1146): n = any nucleotide
  misc_feature (1153)..(1153): n = any nucleotide
  misc_feature (1157)..(1157): n = any nucleotide
  misc_feature (1185)..(1185): n = any nucleotide
  misc_feature (1190)..(1190): n = any nucleotide
  misc_feature (1251)..(1251): n = any nucleotide
  misc_feature (1961)..(1961): n = any nucleotide
  misc_feature (1963)..(1963): n = any nucleotide
caggaacgtcccatcctggccacgtccgtgcgtccagtgccagcgcatgtgccatgctgtgtgaccactccggatccacaccagccatgcgcaccatgctcgcgcaactgcgacacacgcgcccgtgaaaccacgagagtcggctctgataccactttgtaacgtcccgcctctcccaggccgagcccgcttatatccggcagctctcataggtcatagactgccctcacatttaacctcagagttctttcgagatcggcttccggaaaaagaagttgcaatttgttgatatgagtattctattaatcctattaagccctaggccgggatgtcacaccgtcgaaggcgtccagctgtcaacatatcataagattattagtaatatctaaatacaccggcccaaccatacctagcatatcacaagactatcgggtaatggacaactcatcttttattgtgctagagaggaaaaaaaagtaaattacactttgtactagttttcatattatgtcattctttaaccattattttcatttacacaacagctaactttacatttcaatttagaccaccctaactcagcaaccattccgcccactagctttctctctctattttctttttccctctaatagttggggaaatgctaaatctatcaaggaggagtccggatctccgctctttgtcgagtcgactcctattcctatctccttaagtccctacaagcccaacagcctcgacctcaatgacgatcatgacaatagtgtgcatgacgatggaggaggagaaaagacatgtcggtaaataaagggtgtggttgcgcatgtaaaggcgaagaggagaaacgatggtagctcatgaaaaaagagtggtggtggtgcgtgcagcggcagtggttgctggtggtatgagaaatttattgttgacacaattcctaactgtgtttattaatctttttctattagtattgctgatacgtgagttaccggttgttataaagnanaagnnnnagntttaaggtagtaaagatattganataaaaggtaaagtagtcgagtatcttccccttccctaggcgtaaaagrnagaaaacctcccgtctctcgtctcctccgccgccaagacgagncgcggctgaacaggggnggggcgncgcnatctccatctggcgagcagagcaggggnggggnggggaggggatcctggtgagcatccatccacatcctctttctgattcatctctctcccccnccgccactacttttgtctggaatttgctcgcgttcgttcgtttcgttaaccctagcttctcttctagatctggatgaagctcttctcttaatttcagagccttaaaccttagtactacaagtaacagtttgtttgttcccccaaacccccatgtcccaagttggatccgcccctgttaagactattctgatgttcttgagccgcttactggcttatgcatgatccttatgttattagtcactccatctagcttgctatgtgctgctcagtgtcttttacctcatgcgaaatgtggtcagaattgctttttattttgagatagttcagtcccggatttggactgtaaccctaacatcaaagggtcttgattttcagtattttccactttttttagcttttgttcaccatgtaaattgaggcgtgtcatcatctagcatgatattaaccattttctagcatgccctgtactgattggagtctttcaactcatgaaaagaattatttcagttctatttcctcttattatatggttcttttggttaagatgtaccgattaagagaaactagcttgcttaccttgtcctaactgagtgagttcttctggtaatgattcagagctgctatcccctcccctgcccatgctggttgttactaaacctggtcaactcccagttgagtttcttgaaccctctgctgcccagaaactgggngnattggatttgattgtgaaggcgtagacctttgccgcc

SEQ ID NO: 769 - DNA, 1999 bp, Oryza sativa
  misc_feature (999)..(999): n = any nucleotide
  misc_feature (1657)..(1657): n = any nucleotide
  misc_feature (1686)..(1686): n = any nucleotide
acgttagatgaacttattcattttctctttagggacaagaaacaagttcagatcaaaataaaagtacaaattataaatttacgtgaaaggtcttgtgaatttttctttaaacaaatgaatgcctgcaatatatactcccaaagtaaacccaagaaatggttgcgtgacagaacaatataaggaggtcaaatagtacaaggtcacccacatgtatcctacctactggtatatggtatatccactcgaatcttctatccacaaattgtctcaggcagcatcttcacagacagcagatgctaccaatcctttgtgccaatcttcatcttggagtaccttttccccatttcacttggatttaatacatatcatatattttcatttcgctcggacttaatctgtctgaacttcatatctaaccatctgctggttcgataaactcataaaatcaatgagctccttgtttggacataaattactcttattaaatcaccactgactatctaggagtgccagccatcacatttaaaaggaactgtcctttatttaagagctcctctgtctgtgtttatgcatctaccatgttatttttttttaaaaaaaaaactgtttgtgtattagtgtcggtgttaccgaccggttcacctattctggtatttgatgtcgcaagtaattaatcaacgaaacttattcggttgtcctcttgcaccatgcttgatacaccagcaaactccctcacatacaacacgaaacagctatcatcataacacaagtcacttttggacgccacacaatcaatcaaaaatcaaatgcgcaccgtgtgctctcatgttgaaatttcaggcatgcttgcagcgttaaactgttaatcccatctcactttttctgcaggaaactctcacacagattggacggccgcccgagctatactattaccgttttcactgccaataaccggcgacacctacaaatatttagttggttaaaaaaacactactaatngtttgggcttgacagcgtcgctggctatcactgtaggtaaataaatgtatcgctagcaagaaagtgagaacggaacaccccatgatccatgggacgacgcctttttcaaggcataaattcttcgtggccatgtgtttctccctgggccgagtggccggcgtggcatgaaccgaaagggcgaccacgaccgtgtgggcggccggggcgcgcggaatcgcggatgctggcatctttctccagaacttgcaagatacgtacgtttcgtaaaggttgccggtgacgttagaacattgctcacctcacacccccccgggttgatgtggacctgcccgtttcttagttttggtgattctttgcacgtttcccctcctaaaccttcagatttctatcagttggaaggttcaagtggggaaatggataaaagattgaaagaatagtactagttgaggagtttgctgattttctggttttgggagggggtggatggaagatgtttgtagggtgcagcttggaggataagttggttttcttctgcgttctccattgccctgttcgatcagacgatcactgaaccattccccggagaagagggagatagaagcaaataagctcttcatttccctctcaagagcagctcatcgaagctgtcagatttggncattatcggtgcaaattcagagatggttnagatcaaggaattgtatcctactagttcttgtgtccatggattttttttttcttttctttgctgtgttctttttctgtcatttttgggtgatcatgtgccatctgcttgaacttgggcatgccttgacttcaatctttcaccaagccggatcgtcgtgcctatgtcgatggaagaggtatggagaagtagtgtggcaaaaggaaaattttcaattgaaggctttgcattcttgtggttcgagcaatttggtaaatggactgatcagaaccgatcctttcgttacagtatgaaatagggatcagctacaccatc

SEQ ID NO: 770 - DNA, 2000 bp, Oryza sativa
  misc_feature (1275)..(1275): n = any nucleotide
tagtagtatgatgcttttatatgtttttctttggcaatctaatttcgcctatgccttggttccgggttctgagttctgacaagtgacaattctcgaactcattaagcacaagcctatttcacccttacaacaattcggaagaatatagatgggttttaaacatttgataatatttgctccccactcagatttggttactcgaaattgtacaagacctgacattcgtcatctggacactctagtagataaacgtgctggctgatgctagataaacagatgtaaagatgaccacttcaccatcaaccgtaaaaccggacgaagatcaccaaaaattgatactttggagcaacgataggcagcttcgattcagatagcacaatacttaaaagaccacatactagcatcgaattgatacatctcccctccaaatgaggctccaaaaactatccattgtttgatacagcaagcaataggatgtgagaaactgagattggcatttgtatttcactactctcatctgatgagacatgactaggctgtaactgaagctgaatctaaagaggaagattagtgtgggattgcagacaaaactgctactacttccttcctgcactgcaagaagaagaaatctgtatccagtctgtgttgaaccccattaaagcacacacagcagcttcgattcagacagcaaaagaaacattctgatagatagcatcaaattgatactagtatttcgtttgtgtcaaaaaaactctcgatatgtcgtaatcaaagctcgaaaatcccatttgtttgatacagcagcaacagcaagaaaggaacccctactccgatccagccactgaaacagtactaatgaatccggattcgcgcattcatcctatctgatgtgatgaaaagaagctagagtataagaatctaatctgggagaaggttgaggtcagtcgtcgaaggcggatgaggggtcggcgaggtgggcgaagcgggcggcggaggcggaggagaggaggaggaacttgcggacgcaggacctgacgcagtcctcctccttcttgccgagggttcgccggtagaaggtggtgacgcagtcggagaagcaccggtgcgacacccagttgtacagccgtatcctgcgtgcacaaaaatccatccatcgctactccactctctctgcgaggaggaagggaaggaaagtaagagattaaacgtacgcgtctcgggtctggagcttgtcggcgaagggcttcaagggggccttgtctcctcttcttcccnccgccggcggccatggcggcggcggcgtccatgctcttcttcagtagcagcacaagaagaagaagaagaaggagaaggagaaggagaagcgtagcccaagccctaaggccctttagtatagttgaagtggtgagatgggccgtggtgggccttcggtaattgagcccatgggctcaaccccgaaaatgccagtgggctaggtgaggtaaaccgtgcacgtgacgctttcagtttcttttcttttctttccttattatatcatcaaaaaaagaaaagaaaaagagaaaaaaaggtatggaagatactgtatagtatacgctagcagcataagctccgtccgtataattatttcttgtacgcatatgatgtacagtatgtattttacgagctgtatactaccattgcgttggatttatgctggagctatttgcctatgtagtggagtattctagaaggatgcttgtgcgccgtccattgcctgcagaaacggacggcgcgggtgggtgggccccacagggcggtgactgacgcgtgggccaccacattgggatttggctttgctttgctttcgtgccttgtcagccgctgcccccggccccttcttctccttcttcttcttcttcttcttcttctccctcaccatcaccaacaagagagaggaggagtggattcatcgatcgagaagtcgaggtagtacatacgttggattggattggaggaggaga

SEQ ID NO: 771 - DNA, 1999 bp, Oryza sativa
  misc_feature (951)..(951): n = any nucleotide
  misc_feature (1511)..(1511): n = any nucleotide
  misc_feature (1536)..(1536): n = any nucleotide
  misc_feature (1544)..(1544): y = cytosine or thymine
  misc_feature (1593)..(1593): n = any nucleotide
  misc_feature (1597)..(1597): n = any nucleotide
  misc_feature (1604)..(1605): n = any nucleotide
  misc_feature (1683)..(1683): m = adenine or cytosine
  misc_feature (1686)..(1686): s = guanine or cytosine
  misc_feature (1929)..(1929): w = adenine or thymine
  misc_feature (1934)..(1934): n = any nucleotide
ccgccgcctactctttattgtcattgggattctaaaaatcgaacataactatcgttgtaattcattttaattttctagaagtcccgccaaccatcggcggctctgcaactataatcctatacacccctcccgctgcttctcctttttattgtcattgagattttaaaaatcgaatatgattatcaatggggttttttttttactttctagaagtccctgcaaccgccttacccgtttacttcacggcctacctgttgtccctccttttaatcgtcatttgaattctatttgatgttttatgaacagtttttatatatccaccatactctactcttttataggcatgttatttaatttatctcgtcatgtgttttaaatggtcttttctttcaatagtctttatttttatcaccaattttagttatttataaattgtattactaattgaaatatttatttcttttctaatatcaaaatttttttgtttcaaattttaattaataccgtatagtgttcttttaatatattttattttttaatttcagttttttcaaaattctattcctactttaactctcttttaatttaattttggatattatcttattttttattctgaattttaaattgtattcctacttaaattcttcttttctttttgctaatttcagattttatttttatttttattctgaatattaactaatctctcttttcttttttctaatttcagattttgtttttatttttattccgaatattaactaatctcgtattgggttcttatatggactcttctctcaatatcccttatttttaattccgaatttaagttattttaaaattgtactcctatttggactctccttttattttctaatttcggtttttattttatttttatttcgaattttggttaatctcgtattgggttcttatatggattcttcnttcaatattgcttattttaaattccgaatttcagcaaattttgaattgtatttctacttgtactctccttttctttttctccgattaatgtgggaatttctagtctccacaacgaacgtggtgactcctttcaaagctgttttaataatataataaatttactttgaatatatatatatatatataataaatttattttagaatgaagatagtagacgattgaaatatatatttgtgtggctctcatcttattaccttcatttgcatttacttatgaattctttgccactaattaaattttatataagagttagaattgactttttgaattatttgctactaactttaataacatcaagaattatgaagccatagagagtactatgaacaatatcacggttaacctacttttataatgtgatatcttctatatttttcttttttgaaaaaagataaatagtgaaactttgcaaataaatagtaatccgatgacaaaaaatgcaacgatcaaaggaggtagcaagtacaaacctatgtcaaactgaacttacgactaaatngcttgcacgctgaaattttcaagtnatttaatyctcacatggttaaagtgtcaaatgtggtccagtctttggtactcacatnacgncacctannaataactagttaattgtctattgtgcccctagttagctctcgttaatcaattgcattgtagtaatccatccatgcacmcascacccacctctctttctcccgaacagcaagaagatgagccaagcccatggcgtctataaaagagagccctaccccctccatctcaaaaatttcaatccttcctcttccttagcttattagcttccttccttcactagtgccagttttcctcctacctaatctaagctagccaggtcgtcatcttcttccttcagctcacgctgaccaaacaccatctgttattctgtttgtttgttttttttwaaaanaagaaaaaaaatctagctaggcgagccgattgaaggagctgagcatgccgagcagcggcggcgcc

SEQ ID NO: 772 - DNA, 2000 bp, Oryza sativa
  misc_feature (6)..(6): n = any nucleotide
  misc_feature (84)..(84): n = any nucleotide
  misc_feature (88)..(88): n = any nucleotide
  misc_feature (91)..(91): n = any nucleotide
  misc_feature (187)..(187): n = any nucleotide
  misc_feature (928)..(928): n = any nucleotide
  misc_feature (1018)..(1018): n = any nucleotide
  misc_feature (1020)..(1020): n = any nucleotide
  misc_feature (1043)..(1043): n = any nucleotide
  misc_feature (1052)..(1052): n = any nucleotide
  misc_feature (1055)..(1055): n = any nucleotide
ctgatnaataagcaaagtttctaattttaaaatgatgtatccggttggatgtatataaactcaattatgtcattattcataccncccnccntatttgagggctaaattacctgattaataggcaaagttcctaattttaaaatgatgcacatatccggttggatgtagataaactcaattatgtcantattcataccacccaccaaatccacatgcttaaacacacacattaatgcccaagatataaaatgatcgccctgcaccctgcatacgtacaagatatatactccctccgtactcgtaaagaagtcgttttgaacagcgacacggtctccaaaacacaattttaacttattgtttctataaaaatatttattgaaaattgatatatgtatacttttataaaagtatttttcaagataaatctattcatataatttttacattttcaaactcaacaacttaagagttattcatgatttatattcccaaggtttgacttaaacattgtcctaaacgacttcttttacgagtatggagggagcacatgaatataaaatcagaaatgctgtaatccctgccatctcaccacgattatataattactccctttgtcccaaatataagatctatacctttttttacacgatcttcaatacacaaactttaacaattaatttattccatgttttactctcaacgaatacgaaattagcatcacatagtttattcctatattttgcgacggagggagcatatatcaaccgtcgacccaccatcggacggcccacgttgcatctcatcagatctgatttctctctctctctcaagctcgtctactccttccactaatcaccaatcatcagcaaatcagcagcttccatctcctccccaaagccatcgtcttcgtctccaccctccccgggcnatccccctccctcccgccatcgccgcgcgctcgaagctcgcctcgcctcgctacaggcgcggtacaggcgcgcccagcttccggcgaggngncggggcggctcggataatccccncaggtgagnagntccggttgccacgaaaccgatttcatttccccctttgtatgtatgtatgggcatggttgggattgggggtggttggcttggtggattagcgcggattgtttgagggtttgtgaggggagggagtggtaagagtctgatggagagggatggtttgtgggtgaatcttaggcggcgttcaatgtgggttccggggggtttttcttagctttgcttacttgtgcgtgatgctctccgtggaaatttttgggattagcaagcagtcaataggaggagagagtgtgtttactctttagtgatcatgtgtgtacggatactggtcaaccagcttgcgtttttcttcctttagtggggaaaaggatgcagatggtggagaggcaggttgcgttagatttggaacagtaaccttcttttggagtaaggttgttacccactacctagattgtagactttatgatttctatatgttgagctgtgtgttttacactatatttggatttattattttttttccgttgaaagaggaggagaaattacagaagcattctcggatacatgaacagacaggtcgtctcatggccgcaattaactgattaggaaaacatgtgacaaccggaaaattcctcgtatgacttcgattgagttccttgaccgctgattgaattgctgattataagttttgtctccttttgttttctggtgggatatttgacgtgttgtttatgggtgataactgggaaaggagactatttctgaactcttgattggtatatagattaggtatatatacagtgatccgagctggttcagagcatttgctaaagttaatattgataggtcatttcaaatgtaattaagagtacagcttataaaatggatttggttggtgccgaactgctcaggataattaatcaaacatttttccgatccaattgatgtagggaagtc

SEQ ID NO: 773 - DNA, 1875 bp, Oryza sativa
  misc_feature (7)..(7): r = adenine or guanine
  misc_feature (8)..(8): n = any nucleotide
  misc_feature (18)..(18): r = adenine or guanine
  misc_feature (19)..(19): n = any nucleotide
  misc_feature (27)..(27): n = any nucleotide
  misc_feature (44)..(44): m = adenine or cytosine
  misc_feature (45)..(45): n = any nucleotide
  misc_feature (46)..(46): m = adenine or cytosine
  misc_feature (47)..(47): n = any nucleotide
  misc_feature (55)..(55): y = cytosine or thymine
  misc_feature (56)..(56): n = any nucleotide
  misc_feature (79)..(79): w = adenine or thymine
  misc_feature (80)..(80): n = any nucleotide
  misc_feature (112)..(112): n = any nucleotide
  misc_feature (125)..(125): n = any nucleotide
  misc_feature (127)..(127): m = adenine or cytosine
  misc_feature (128)..(128): n = any nucleotide
  misc_feature (132)..(132): n = any nucleotide
  misc_feature (152)..(152): n = any nucleotide
  misc_feature (158)..(161): n = any nucleotide
  misc_feature (168)..(170): n = any nucleotide
  misc_feature (174)..(200): n = any nucleotide
  misc_feature (224)..(224): m = adenine or cytosine
  misc_feature (225)..(225): n = any nucleotide
  misc_feature (229)..(229): n = any nucleotide
  misc_feature (237)..(237): n = any nucleotide
  misc_feature (248)..(248): y = cytosine or thymine
  misc_feature (249)..(249): n = any nucleotide
  misc_feature (264)..(264): k = guanine or thymine
  misc_feature (265)..(265): n = any nucleotide
  misc_feature (296)..(296): k = guanine or thymine
  misc_feature (297)..(297): n = any nucleotide
  misc_feature (327)..(327): k = guanine or thymine
  misc_feature (328)..(328): n = any nucleotide
  misc_feature (670)..(670): n = any nucleotide
  misc_feature (755)..(755): n = any nucleotide
  misc_feature (929)..(929): n = any nucleotide
  misc_feature (941)..(941): n = any nucleotide
  misc_feature (1636)..(1636): n = any nucleotide
  misc_feature (1644)..(1644): n = any nucleotide
ggaattrnggtgagggcrnggacatangaaacttcccccgtttmnmnatgtaagynattctagcattttccacattcawnttgatgttaatgaatctagataaatatatatntctagattcattnamntcantataaatgtgggaaatgctngaatgnnnnacattgnnnaacnnnnnnnnnnnnnnnnnnnnnnnnnnnacctaacgtaacgtaatggatggmngcantggggtgngggtctttctyntttttttctttaagknaatccgagggtagaaaatatgggtgcaccgkntattagtgaaaatcgatggctagatgtttkntttttctataatttttctagagtgatacatggtgagatgagagtgtttgtagaatgccatataacggtttgagaatgttttaaggatgcttaatagccttttagtatataatagattatcaaaaactaactattatatatcagccccatgtgtcgtgatatatttaagaccacaatataacttataatttaattaaaggaaaacaacggaatcagaaattagatatataatttaaaaataatttagaagatggttcaaggaacattggttggatattttatattattattatagatcttagtttaactatatatatttatatttgtgatgtaatatatttgnagaaaatcatattttatttaaagatcatcgatttttatgatgtatttttttgtcgtcttttttatgtatatgcgcatggttttgntcttttctttccagcgaatagtacgtaaactattgttttgtttttgtgcacataagtacgtacgggagaagacatcgtataaacctgtacgtacatgacaacagtagtagctcttaaatcatatacagagaaagttgaaattttttaataatagatataatccaatgggtatanaataacgggttnaccaatttaagtgaaaatcgacggtgagatttgataatgccaagtggcagcctatgagcgtttgtagcatgccatgtggcggtttaggagcgtttgtaggaagtttaattgacttttagtatataatagataatagatagatagatagatagaagattgcatacttactgtatgaatgtttcgttcttgtaaattttatcagtgatatgcctcacaatcattaacacattatcagtgtactgcctgctgccactctgattcgagtcaagtttgttgtgcagagcactgctccagttaatatacgtagttcagtaattaatttcggaggtcaataatatcgtcataccacttattgtgcttcttgtaagtgtcacatggagccatctttgttattccaatgatattggcccaaatcgatttcatcaaatttcttggaacatgctcaaattttaagtggggtattaccgtattagtgggaaatgttcgatctttctatagatggtgctgggtacatatcccaagtggtgatttgttgctgaaagtgctcctccttttgaaagattgtgttttcagtagatgctatcactgaagaatcatttgatgttttaggtttttagctcttagcattatctggctgcagttgttaggccaccttgatttgatgtagatattagcctgtagccattatcatgccnagatctanatttgttgtgtattctcagagtttactgtactctcgatgctgtaaccgtcctttcttctgatttcttttagagatattaaatgttaagatcatttcagacttgcattctgtgattgctttggttactgcaactttattagtgaacagcaccttgctgtaatcttgctgattgaattctattttgatgtgcagagtattacccagttcagtaattaattcgtgagttgctca

SEQ ID NO: 774 - DNA, 1999 bp, Oryza sativa
  misc_feature (229)..(229): n = any nucleotide
  misc_feature (258)..(258): n = any nucleotide
  misc_feature (730)..(731): n = any nucleotide
  misc_feature (734)..(734): n = any nucleotide
  misc_feature (1259)..(1260): n = any nucleotide
  misc_feature (1341)..(1341): n = any nucleotide
  misc_feature (1359)..(1359): n = any nucleotide
  misc_feature (1423)..(1423): n = any nucleotide
  misc_feature (1426)..(1426): n = any nucleotide
  misc_feature (1465)..(1465): n = any nucleotide
  misc_feature (1652)..(1652): n = any nucleotide
gcgaagggccaaatccgcagagaacgcgagacgtcgaattaaaagcgcgagagctctaggcccaacaagaaggcaacgtctgccattcgattatcgtgaaaatcgtacgattattgtggtttttaaaaattaaaaagttactgcacatggtaatcataataaccacgttatgatagtacagttttgcaaacccgtgccacagccacaatcgagcggacagtcgcctaanaaaataacccgtgcgcgtgggaggacgcngcacgggcacatgatcaagcgcgagagcttggtggcacacgaggcgtactccgtacaattatcgtgaggaatatcgtgattttaaaaactaaaaaagctatgtataataatgatagccgcatgatgatagtacggttttgtaaacccgcgtcgccatggcacccgggccgtagccgccatggtcacctgagcaaataatccgcgcgcgcgggaggacgccgcacggccgcacgagcaccctgatcgatcaagcgcgagagctttggcggcaggcacaccgcacacacgaggcgtgctccgcgatcacccgatgaccaaaagcagagcgcggtgtagggcacccgcacgcgtcgcgtggatcgatcacccggccaaagacagcgcgcgcgcgcgcggcagtgcggcaccggccggccggcacggcgcgcgggtggtggagtacgtgtacgtacacgtacgtagccgcgcgcgnntcncgcggtgcgcccgagagcgagcaaccagctgcacgcaacaacgacggcgcgcgcgcgggttgatcgatctcgcggtgaggtcgcgcgctgacgctgccatcggttcgaccaattgccgataatacattataaacagcgcagtagcgataaataataatttatactctgttttagattataagtcgtctgtttcagattataagtcgttttgagttcggtgaaagtcaaactgcttcaagtttaatctagcttgtaaaaaagataatatttttaacccaagacaaatatattatgaaaatatatttaattatagatttaatgaaactaattttggtgttgtaaattgtcgacgtttgatgtcgcgattccagtatttgcacagtatggggatcgttggtactagggtgtacgcgagactgaggtaaaagagatggaaacatggatttttatacaggttcgggctcctgaattgtcaggtaataaccctacatcctgttggccgaagccggtattgctcttattcannataattacaccagtacaatatttgggtagcctatctaactgttgtcgacttagcggtctgtaggtctgactcgtaatcganaacagggtagtcttcctnctcgaatccgtgcccggcgagatcggagataacgctttcgtctctcctaacagtatccagaganacngtaggggactagccgtgcttatccctgaagtcgatatcngacgtcttgtcttggcatatgttgacttgtatgttgatcttgtgtcttgatccgtagattgtggtgggtgttgattaaggtggtcgtatcttctctctcctcctagggggccttgtatttatatccataggtgtccccttgtccaagtaaaactagggaaaccaatatggatacaattcgagtagtnccttgtcgttttcatgtagaactatggttgtctttccttatccggaactcctcctatatccgcaggttgtttccgtataggacatggtatgtggtgggtcttgccaagatttagtcaactactgttaggtatgtgttatccataaccctgacataaatattatactatatttgtttataaacttagttaaatttaaagtaatttgactttggccgaattcaaaatgacttataatataaaacggatggagtagttaaaacttttatatatgtatttttatgacttaaatgtcaacattgaaaaagaaactataacgaaaaaaagctatatatgttgaagggtaaaag

SEQ ID NO: 775 - DNA, 1999 bp, Oryza sativa
  misc_feature (39)..(39): n = any nucleotide
  misc_feature (152)..(152): n = any nucleotide
  misc_feature (158)..(158): n = any nucleotide
  misc_feature (165)..(165): n = any nucleotide
  misc_feature (171)..(171): n = any nucleotide
  misc_feature (173)..(173): n = any nucleotide
accacgatcacatcactcaccgactcctttgactaatcncttgatagatactacaccaccatacttttttttgtttggatgtacacgtggattggacctattccatgtggattggagtaggtaatattgttaactgataatgtcccgtactnttctgnaggatanatgttngntattagagaaatgatgaaatgatttgaactgaaatattatgaaaatgatttgagaatgatgatttagcatgtgtatgtttagttttaggatgaaataaattgtagatataattactatatgtttacatgttgagttttgtgtgcttaatagattgatgtgtcatgtttgtgtaggtttacgagtgttaataaatactatacttgcatgttgagttttaaatatttagtgggcattagctttataaaaagaaaagattagatcaacaaaacaaacaatccaattccttctgtggagaagcaagacaaagttgaccgttgacatcgtcagatcagctgtaaacaagtcatggaaggaaggcagaccttcagatttctgtatgactatgcagaactaactagccagtagccacccatcaatagcctgaagaccaaaaatctaagacagttatccttttttgtttttgcttcttgtaatttggtatagtttttgcatgatcaaatgtgatagtaagtgaattttctctaaaccttcctggcatttgcaaatttcattgctggaaaatcaactccaatgcacagcaaaaatttcaggtttgttggtgcaggattggatcaacctcacacacatgttcagaaatagtactaaaagtaagtatcatgaggcacatggaacggaagcacacacgccattacaacacaatggcataaacgaagttcaggcccaaaatggcatatcaagatcagctgttcgtgcattagctagcacttagcaatatcttggtacatggagagctgctaattcagattttacttcaggtatttcttgaaccaatccatcatgtcttccagggcttcctcagcgctcttgacggcagctgcatcatcgtgattgtatctcacagcccatccatgctctacgccggggaaaatcttgacgaagtgagcaatctgtagagaaaatggaagacctcaaagctctccgagatttttaatctgaactgaagtgctcacgtggatatccaaacatgcagggcttaagttagaaatacatttgaaaagcaggaaaaagacctggtcgatttgcacacatattatgtttgcatatattttaaaattttggagtgaatttgtgtatttcataccttggtgcctgttgggctgtaaatagaataatgtgtgtgtgtgtttgtgtgctggcccatcagctagaggcccatctactcatgtatatgtaaataacgatagcaatactgaaggggtgaagcttccagagaaaaaattcacaaactacatggtatcagagccgtgctcctggcggccggcggcgacgaaccctagctgagggagcaagcgctgaggttggagttcttggtggtggtgtaggacggtgagcagggacaagtaggagtggactggaggcgcagcaggtcaggacgctcgcggctgctgcagcgagcggcggtgacggcaacacacagcaggtgcgtgagctgagcagggaggtctggaggggcagcagctacaagtgggttccccggccgtgcttctgcttgttgagttggttcccagccgtgcttctgcttgttggctggtggtggactctgtactgtggcttgtggttgagggaagaagcactagtgactgttgttactgttgttcttcttcaaaattgaggtaatcgagattgttcttgctgctactactgatttactgggaagaaaatacagggtagaggaattgttggcttgttgttagtgctgctggtggagtgtagacaaggagagtttgctttgttacagcagttagttgagtgctgcttgattaaa

SEQ ID NO: 776 - DNA, 2006 bp, Oryza sativa
tcgtgatgacctaacctgaagaaagccatctcatatcaagaagacaagaacttcatactgatatttttttaagtatattattcagtaatactttggccactgccatgtagtctgttacaaaaccttgttcttacagaagttaaaaggaacatctcaaaatataaaaaggaattcagaaaaacaatagcaaacttttggaccattgttgttgcttcaaaagtcttgccagtgttcatcctggtgaatttattgactgttcagtgtttggtcagtttaacagctcaactgttggtttaatgaaaagatggaaaaatgatacttgattgttatttggtagaaacagtcacaattttcctggtatgaataagtagttaattcaagctcattgtcccagtttcgaaacccatgttgcatgtaaaccctttgatgtgatttgtgaagtagtcggtccaattgattccttcaatacagtggtggatccagaaattttcttgagcctgagcatgcttaggctgtgtttgagatgacatctatgatgagattatggtccacatgcaaaacgagacgagtgattagggtatggttaattaggtattaattatccatagttttaaaaaaatataacaaagcagaagagagatagtgacctctgacaataatctatcagcatcaggagtccaataacatgttctgcttgtttgccatttttttctacctgtcttaaactagtgcacaattaaaagcctgctttggtgctcaaatagtcgtgcaggacaccatactaactacaaactgcaccgtatagaagcatgacgcctggtgccgtttgttgcccgggagcaaatgccattggctagcagaggaacagcaccgaagtccattgcggcaaagactgggagcccgggcagctgcccatgctggctgggccctgaatccgccgctgcttcaatatatcatgaaactagctcatcgaattgtattttcaccagttcagagttgcttacttgcttcgattatcttgtgtccaacttggatgagtcactgtctgctgatcaggtccatttttaaaattatggcactagagatggttgtgttctgaacaaaaattcaatcaaaatcagtcgcagtctactctagtgggatttgtcctttgaatcagatggacatttttttaattcaaaaactagatgaatatcataaaaattgcctttttaatttttatggtgtgatatcatttgaaaacgtatcactgttagttatggtaaatgaaagagaaaacattttgttctttagtaggtcaaacaatcttcactgtacagtgctcttttttatggttgttactccctccatcacattttgatcatcctctaagtaaatgacaccaagaccaaagacaccaaaatattcatcattctcaaattaatcctcatcgattaaagtgtttcatcgcttcgtgtcccgtggattgctcatgttttaaatattgcatgccattgcaccaatagaaattaatcttggttggttgcatgtaacacattcaacgatgcacatgtactctttgcacaaataaacaaaaagacacttgttagatgatgatcattttaggaagacttcaaaaactttaggaaatgatcaaaatgggatggagggagtactttttaccttattctggctgatggaggcttcttactagcagtttgagaggtcggcaaacggaacagacaaaaaacctgtttgcataatgtaactatcagcttatacctattgatcaatagataatgctttttccatgagggtaactccccacgttccattatcaaagataacaaacacaagatcctgttacatcactctggcacatctctcctgcaccttgctaagcaatatggttgaaccaagtaactgacgggtagtttataggatggttgttcttatggggacttcaaatgcatttagattggcatggatgacaagattgtattcttcttattttccagctgaagatg

SEQ ID NO: 777 - DNA, 1999 bp, Oryza sativa
  misc_feature (1053)..(1053): n = any nucleotide
tcgccggagaagccgaaagggtaggggacatccaacccaccgcacttcctcctgcaccgctcatctccgccggtggcggcggcggcggggctggcggagagagctccataggggagaatcaagaggaattgcacgccgacgcagaggaggaggaggaggcggccgccggcgaggtgcatcttgagtttggctagctcggcaggcgagcgaaactaatatttcagccaccgggaaggaattggctggagcatatatgttgaaatgtttgaatggacctggggttgcggtggctaaagctttgattagtcaagcaaaacatggtcaatctagagagtacgtaattttaagaacgaccatatccttgtgagtactacacgagggaggggcaatatggaaggtaattccatgggcctagcttctacaccttccgttcaagaaaaaccccaaatttaatcctagctacgaaacttaacacacatgtactcacattcatagttaggattgattttttttaatgggatgggtggaatacctctttatcttgagaaaaaaaactaatggttaacttaaaacctctttgtcttgaaaaagaataatataactgttaacttaggatcatgagagtaaatataaaatagatcaaaataaaaatttaaggacatgtaaggatatgattaaggaggtaaagagaaactctaggaggcgcacaaggaactttgtcttattttttattttgtcttcactattttactataacaactactctctcatttttcacgcgcttacttccaaaactgctaaacgatattatttttaaaagaattataaaggaaagttgttctaaatatatattttcaagtctttaagctaatacttaattagagcctgtttggcacagcctggagctcatccaaacagtttcagctccactaaaaataggagcagagttggatggagctctcttacaaaatgaattagagatgtggagctgggtttaggcagctacataactccactatagatctaactcctgaagctaaatttagaagtttnggacctctaccaaacatgttaattactcattttcgccttttcggtgtagagggaataacatcccaaccttgaggtttgaactgatctttagacatctttatacagagactgggtcatggagtgcctaaggcttagggtcaaaagcccatgggccacaacacttctttccattttaggccgagctcttcacaaattgatggaggctggctcgagtcttaactttaagctaggtcgatttttaatgttaactcatttttttttggcaagttacttttctcgttcattaatagacgcgtacaaaacatgcagttaaattttgaaaccaaacaaaaattatagttcaatatatgaaaatagaattagtagttacttcctccgtttcatattataagattttctagtagatatttgtaaaaaaatatacacattaatattttaaatacttttctgaacacatgattaaaaacaaaatgatcaaatatgtagatgctgtactgtcgacatattaaagaacgagtaattgacctatgatgtagcagcctagcaggttgaattcaaatgcgagaagccatgctagaaaaattggtggtttctcccaaaaagaaataatggcaggtcaaagagtttgatgtggctatttattaattttttttgacgtgagatgtggctatttatcaccgtaggcatcagcatcatcagatgcatcgtgtcaaaagtatgactagttgacaatcatatttttttgcaaacaatttctgttgatcaaattaatcaaatcgccatttttgaaaatctcacacctatagctctaaaaatttgtcaggtattttcctcacagttctttttaaagtatttctctcacaaaaattttacggctccttgaacttattttaaaatttcttttccaaatcgatcaactaaatttaaccttaacgttttctataaa

SEQ ID NO: 778 - DNA, 2000 bp, Oryza sativa
  misc_feature (7)..(9): n = any nucleotide
  misc_feature (15)..(15): n = any nucleotide
tttttannngttttncatcgtggttcattttaagttgacttaaaaaaaacctgtgaacattattatttttatgcttagttcttttttccatggcttatgagccgtaaatcaaacaatgtgtacttcgattttaaaatgagatggtaaatcctagtactatattttagaaacagatttaatggctaggtttcgttatgctcgagcataccctcaaatgtttgcataaaaatttaaaatagatgatatctctttgtgattggtgttggagaaggattatagaaaagaagaacgggtgtttgctcgtcctggaagaagaacataagcaacacaatgatatgattagaactgaaacggtataaattaaacaacttactccctccgtcacaaattacttgtctctttaagatttaaactttgtctcaaaatggttatcataataaaatactatttgttccatcaatcgtttctaattcaaatttatcttttttcttgcccctaaccaacctcctacatccaaccatacaatatttagttaagggtattatagttttttttcttaaatcttaatctatgctttaaaaaaaaggtaaaattgtggcacatcaacgtgcatgagcttaataatttgattagatcaaaataccagcccatatccccatacacatgtggtcaggtagatggacgaccttcaagtttgttgttttcatgttcaggcttgcatgatacgattacgatctgccatgatgtctttttctcgagattatggtgtcgtagtcgtcttcaactacagtaaccagacttttatgacagaaaatggtgcgccaaagcagccataccatatgaggaaaggaaaaaaaagatagaaaataaaacacaatattgaataacttgcaaatattgtattgtataacaagatttgtccttggggaccttttattatgcgtataattagcgtgttttttttcgaaagtatttttatcccgaaaagagaagcactagaaaccaaatttcaaaggaatgcgacaagatttatgatgatagccttactggagaggagcatcatgaaatcatcgtgaatgcgacttgaattgaattattatgctcatcgctttcgcataacctctgtaggagtacaattctttactgtactaaccacttttgattaggagtaggagtactgattttatttcaggataaatcaaagcaaaaggaaatatatgcaccttgtcgggtcatcgtggctgctttgatgatgcactcatcaccttcacacgtcggatctaagagaaaaacggccactaaaatgcattatacaattctaataggaattctcccagtcgaatttaagagagaatttggtctcgaactctcaacgaatgaaaaaaaaactctgtttgaaacgacttcagttttatctttgaaccaagtagttgtctaaaatagcgacggataaaatgtttgtgcaacaaatgtattattactatctcttttctacacgataaagatttcgcatgaaaattgaatgtttttctagtattctcccgtttcatattataagacctttgctttttttttctaatctggctttgttaagtttgactaaatttataaaagaattaataatatctaaaataaaaaattagttttattgaatccaacattgaaatattttaataatgtgtctgttttattgaaaatattactatatcttttacaaatttaacttataatatttttaactaaaatgaaataatatgaaacatagtgagagaggtgagagagggagtagtaggtttggagtggataggtgagcctgaacatgaatgagtcagcgacgagtggaacaaacatgtggtgtgctgctgccttgtcgtcatagaacaaccttctcttcccttccctcacctttcgcgttcacctcagctcagctcgtctctctgactctgatctcgccgtcccgagttcgccggacacgcacgcacgcggccacgacggcggcg

SEQ ID NO: 779 - DNA, 2000 bp, Oryza sativa
  misc_feature (3)..(3): k = guanine or thymine
  misc_feature (112)..(112): y = cytosine or thymine
  misc_feature (123)..(123): y = cytosine or thymine
  misc_feature (131)..(131): s = guanine or cytosine
  misc_feature (134)..(134): m = adenine or cytosine
  misc_feature (145)..(145): h = adenine, cytosine, or thymine
  misc_feature (146)..(146): n = any nucleotide
  misc_feature (216)..(219): n = any nucleotide
  misc_feature (225)..(225): n = any nucleotide
  misc_feature (299)..(299): n = any nucleotide
  misc_feature (310)..(310): n = any nucleotide
  misc_feature (313)..(314): n = any nucleotide
  misc_feature (319)..(319): n = any nucleotide
  misc_feature (326)..(326): n = any nucleotide
  misc_feature (328)..(328): n = any nucleotide
  misc_feature (331)..(331): n = any nucleotide
  misc_feature (333)..(333): n = any nucleotide
  misc_feature (335)..(335): n = any nucleotide
  misc_feature (340)..(341): n = any nucleotide
  misc_feature (345)..(345): y = cytosine or thymine
  misc_feature (346)..(346): n = any nucleotide
  misc_feature (348)..(348): s = guanine or cytosine
  misc_feature (349)..(349): n = any nucleotide
  misc_feature (350)..(350): y = cytosine or thymine
  misc_feature (351)..(351): n = any nucleotide
  misc_feature (359)..(361): n = any nucleotide
  misc_feature (365)..(369): n = any nucleotide
ttkgcagtcacctcttgtccttgaggtagtctttgaacgaagcttcaagacgctggccgtccacatccatggcatcgtcggacgcacttgctggaggacatcacggaggatycccctgatctycggcgagscamcggcggcgachnaagcacggtggcggaatttgtcctttgctcgaggttcatcgtagacgcttggcgagggtcgtcttcaacnnnnaacacnacggagatcactcgcatctgcacggctcgctccactcgtcagcatcgagaggagctcttcgacgtctcgatgcncgggctgcgcnctnncgacncgcgcgncnacncnangatgnncgaynasnyngcgatgannnatannnnngattgatggtgaggactcgctggtgcgcttccctgaggcgtttcttgagcttctggatctcgtcgccgaagctcgagcggctcttgaccttgctgagctcgtgcgtgacccggcgcagcagcgatgctccggcgccggcgccgccgcgtttgtggtggttgcaggtgaggcggtgcaagaagcggtcgacgcagtcctcgatgtcgtgcgcgaggtcgagcatctcctcggtgtacagccgcgcgacggccgtgcgtgcggcggcgtcgctcctccccatggaaagctgctggtcgtccatggcggcggcgatcatgcggaggtcttgctgcagggagtggctttcttgcgcgaggcctctgtgcttgttgtactctttctccagcgccatgaacagcctccccatgactgtcttcaagaatgcggtcgccgccgcggactccatggacatgtgccaaggatgagcagcagcagcagcttgggcagctgctctgcaagccttgcatcctccaagtcgtctgctaagtcaacagctcaatatatgcgcggatatccccaactgagtgcaaaatcagacaagtaagtgcattcttttcacaaacctctgaatattattattatcggttttcagataatcatatcagtggctttatatcagaaaaatagttttaagttttaacaatcttcttcaaaattcagcactgtatttttgaaaaggttttgtgtcacaacttcatgagtcatgacgtatttcacattccagtacagtacaaaataggtgtgctcttagtgagaaaggattctgtttattttggtgtgtgaaaaagcctgtttactaattcctgttttcctgtatgcatagcataaaagcctaaaggatgatatattgctctttagccattcaagtttgtcgccaagatgtttcttttttttgtctatggtcaagtgggtcgtgaatttgcatatcataatttgtgaaactttgacaagtaattctgcattttgaaactgtaaataatgtgaagtttgagggttgatatgcaattctcaatttcaggtatacttgaggaattagtgtgtaaagcataatagcatatcctgggatggctggatctggatggtgctccagtgcttgtcaattgcgtatagtaatcattatttaagtgtccaactgctacactaatggccccatcgactattctaaagagaactagctgaatggcctagagagtagagacaatgaatttgaccagacgccacatcgccagaggggaaaatttcggacttggaagctaggaaatgaatcaaaatggaacaactctcccccaactccgaccgctcggaaagctcgctcatcctaatctgatatgatgccttcagcttctaggttcagtaatccccctcttatttgttttagtgattcatttgatgccttttagcttttattcagtaatccctctcttgtttgtttcagtgattccaatagtattatttgattcttgttcggcagtacaccttgcaaatctgtaacatatatgcactcgatttgtcttgagagaagatatctatggagggcgccatgtttcaacctccccaggaggctggaggagctgctgtgtcatcacggtagc

SEQ ID NO: 780 - DNA, 2000 bp, Oryza sativa
  misc_feature (1882)..(1958): n = any nucleotide
  misc_feature (1966)..(1966): n = any nucleotide
  misc_feature (1973)..(1973): n = any nucleotide
  misc_feature (1986)..(1986): n = any nucleotide
tattttgttacatatttttttatgttttacttctacactatttagtgtacaaatgtgatgttggaagctatattttattttatggttgcttaattgaaaaataacatgaaaatattcaaattatattgttgcatatatttaaatctcaaaagaagttcatatagtattatgaaatatgtacatatatttgtgaatgtcgaattttcgtataattctgattaattaatgaagggtattttttttggttcgacacccgtattcagcttcccccaacactgatttgtttagggcatagcaagattatgcggttgcgcatgctttaatttaatccttattgaacaagtgtacctcaatagcaccaggatattttatttttgaagtcaatcaggagaaagtggtatgaatgattttctatacgagttagtgggtttgtttcagccgcaccatgcatcaatgcagcatgatcagttatttgactcttaatttggatcttatcttgataaaggtaagggataacgcaaatgttttaagaaattaatgatggatgtgaactgatggtaaagtaacaaagggaggggtgatgcatatagaagatcgaacaaaattcaggagcatcaggagtgacatagtgaagtatttagggacaccatggaattttagaaatatttgtcattgaacacaagactacaaatcaaacacaatatatgaaagattttgagaacacgagtctcgatgacattactgcaacaactttcttttttcatggccatatggctaggattaaccaggagtattggcccatgtgactggaaatagattagaagtatggtgcatggatattgcataaatcatggttatttcttaaagggaggggtggtggcgtatgagacatgagagagaaacaaacagataactccttttatttaaagtagcaatacatgagtctaaatacaaatattagcctcgataacactacccttcaaatcacaatggtatttatattacttttcaaaagggaaatgctacgtaacggtatcgcgttcggacgggatgtattagatatcttacatgtatcattccgtccaaacaggataccgttttatattattctcctttcaaaatttcaatcgcaaccaaatacccgtgaagtcaaaataaattgcacccaaaataccaaatccactccaaatattccaaacccctcgctatactccacgaccaaaataccagaaagaagagagacttggcgtcctccaaaaaaaagggaaaaaagaagggagatttgccgtcccaatcctgagttggccacaggccaaccccaacccaacgcgaccggcagcagcagcaggcggagacgcatggtcatcatcaccatcgactcatcgtcatccatccccgcacccaacaccaaagcgcacacgagagacagatttccttgggcgtttttcctttcccttctcttcctctctttctcccccacacgcatccatcaccaaccgaacggccacatttaatcccaccaccaccgcctcctcctcctcctcgcgcggccgcacccgatcccaatccacgcctcgcctcgccgcgatccacgccgccggtggtggcggtggaaggaaggaaggaaggatgctggagacgaagccgccgtcgccggggacggcgggggcggcgggggtggcagggggtgggtaccatcggaggtgggcggcgccgctgctggcgtccgtgctgctctcgtcgctcctcatcgcggcgtccctcttcttctcttcgtcgcgggcgctcctcctctccttctccccgctcccctccgcggcatccgccgagccgctcttcgtcgaggccaagctgcgccagcagcagcagatgcgcggcgcgnnnnnnnnnnnnnnnnnnnnnnnnnnnnnnnnnnnnnnnnnnnnnnnnnnnnnnnnnnnnnnnnnnnnnnnnnnnnncgcgctgngccgcangctcagggcgctntacacccgtcgaac

SEQ ID NO: 781 - DNA, 2000 bp, Oryza sativa
aaaaacctggtccctatcctcttctccatccgtgcagctccccgacaccttgaccccccagctgctagagctcctctatggatctatccccactgtttgtgactggattcatcatcggttgggccgttcgtttgtcacatgggcttcgtagttgggctaagccccgagcaaacctactcggcccgattcacccccgacggcccaccaaactagccgaaccactcgcctagtctcgtgccccggtgttcctcgcccacactcccaacgcataaccaaccctagctctcgcaaagcaccgccaccctcgccgcccccaaccgcttgccggcggagttcgccgccgcgccgcccctcggcggtgctccctaccccgcccgcctgaccgcccgcctgtccgtcgcccctccccgcctcgccatcgccggcgccccacccaccgctactcgcgcgaacgcaccgtctcgactagccgacgccgccttgggatcgcccccgcccacctccagatacgcggcccggccgcggagccgtgcttacgtccgctaccacccggcgccgatctccacgacgccccgctcacgaggtagggttttggagtgggaacgacgacgatcgcgttccccctcgcacgccgcctgatttgagctgccccacgcgttcgttcggtcctttctcaggtactcagatcaaaccctaacccgatgcttcgcttgtccgagaggatctgtgcaagtgtgtaatcctggattgatgtgatgatagattaatggtttccctctgcatgtgtttgttgtgtgtatgattgtaacagatctgttgtgttgcccatatcattgttgatacatctcgtgccgagtccatttcaagttcacttcttgtatgtgttgggtataatgctttggtttgtcatgtggcagtctatgcagtgttattagtgcatcactccgtatgtatggacttcaatggatatagtcagccatgaaagattcccttaatatgttgtttccgctcatctttgtaatgtttttggctaaccttgcaatttggcggaatatagttagcaaggtcttttcagatttaataatatagtctggtactggttctatttactctgtacgtcgttccagctcatattattaacgtagtcgaatatattctgtctccatttcccgccaaaattctagttggaacggtttaattccagctttgataataatgtctgttactactgctacgtcgattccgtcaacttgtcgtttctaccttgattacgtggcataattttatctgaaatgattggcttggaaacttcgcatctaataacatctcttattgacacgtgtgacatgttggttcccattgtatataccatttctgctcagctcagcaacgatgttggccaattttgttaatatgattacctgccatatttgtttggctgtgtctgattgatgcacatgttgtatatggacctgctttaacgtaatagtgcattatggtttagtattactattaaaagggatgttcattagcagtttttatcctctttggtggacgtaatacctgctgcacttgaccaaaaaatatgttgctgacatgtgaactctacttatcacactttatgtggctgttaatcaggcaatggatagtgcttttgtctcttgtcgggttaagattcctaatatttgcttctgtaacttttctgactgaataaatttgtttgattgttcctgcccatgttatatgatttattgattgattggtacaaattttgtgattattctcaaaaaccaattcttgcattgtcactgcatatttgtttcttttcttcattttatacgctatatcatgcatgttagagtgaatgccatgcatgataatttctggttttattgcaaatactatgaaaattgaaaagctcacacctgcttccttttatcacctattggatttgcaggcatcaaaaccctgatttgataacattaagtggaattttgacg

SEQ ID NO: 782 - DNA, 2000 bp, Oryza sativa
  misc_feature (254)..(254): n = any nucleotide
  misc_feature (383)..(383): n = any nucleotide
  misc_feature (428)..(428): n = any nucleotide
  misc_feature (435)..(435): n = any nucleotide
  misc_feature (437)..(439): n = any nucleotide
  misc_feature (442)..(442): n = any nucleotide
  misc_feature (444)..(444): n = any nucleotide
  misc_feature (547)..(547): n = any nucleotide
  misc_feature (590)..(590): n = any nucleotide
  misc_feature (787)..(787): n = any nucleotide
  misc_feature (1574)..(1574): n = any nucleotide
ccctgaacggttcagatttacctttggtggttggcaggggtcgttcctctcgtgatgctaaaaaaccaaaaggggaaaaatataaaggaattcgatttttccaatgttaacctacttgttctgttgattttctaactgggacatattatcttcatattgatatattgaaattcacatcacaaacataattaaaacatacgggatgcaaattttggtaattcgacattaagcatatcgcttcgtctctctttttntcactaccctaactcttattctaatttttaacaattctaaaataatacttcctctataaaaaaaacaatcttagttaggttctgcacatacactatctagattcaaacctcaaacccagtattggaatncttcaggggcggaggcagcattttagcaagagtagagctgaaacnatatagntnnnaantntttgtgcagattctatgtaaattttagtgtttctccattgaaaatttttgccatgtgtggggcccaagcccaggttgccccacacgtggctccgcccctgggnattttttttttggacggagggagtacaaattcaagtaaataanaacgattactaaaagtcatagtagtaaatgattattagtattctttgacattgaatagtagtaatgttattgtgttaactttgtgcgttgtatcaattttcgcataagttgtacggcaattgattatcgcactattaaatattgataattgttttctaacattgtaaaacaaagaatatatcataaatatctatgantccgatgattgtaattacttttatatttttctcactttttcctagcattagtttcaatagcagtcacactttttttttatgaatgtcgtcgctataaataagactctcaccacatagtaccttgcccactccgactaagccttcacatttcttctctagcgttacgctgtcccttctctcggtgattcctcgatctctcaggctacgttttgatggcttactgcatccgccactctccgggccgttgccagtgctatccgtcgccacctaccaccttacaacggtaagcagatctctctatgccttgccgttattctcaatccccggaggtgccccttttgaacatagctcaactctcaggtcatcgtcggcgacccacacaggcaacttccatcgaatggatgaaagccctcgagtcacgacggcgcctcctcctcagcggcataccaacaacagcagatctatagtggttatactcaaatcagaatctccgataaccggctatgtgtaagttcattccagatctattcattttgcgattcaccctagatctagagtcttctgcaacctttaagctcaaaagtgttagatccacaaatgtgtactctatccgcccgaaaatattataacctttgagtggatgggacactttctgctactacgaatctggacatgtgtttgtccagattcacagtattaggatgtgtcccatccactcaaatactgctatattttaggacgaatgaaaattatggtttatctaaatcagccttccttttttttttcntttttacaaccataggttgggcttgcccaatccaaattctatactgccagggactgtaagggaaaacgggcagggcatggtgctgcaaataaacattccccaggtacccgacgaaaaaaaccccaactttttatttcctgccgttttctttttctttttctttccttttccttttttattctcgtctagtattatttttgcctaatatttctggtggacggacacggagcagatagccagcaggagtccgtcgccgttggtgggaacgagacggttgccgcgcccgcgcgcgagatcggagctccggggaggcgaggcgcaggcgcaggtgggcgcgtgttcttcgtcgggggcaccccgttcgcgctttaccgggagggatccgcggggcggggattggtggggaacgccgcgagcgcagccggg

SEQ ID NO: 783 - DNA, 1999 bp, Oryza sativa
ctgatgcagtggggaagatgcatactgcttgggtgaaggtgtctggcattcctgatgctatgagaggttaccaggccctatatgaagtgggatctaacttgggaacagttatggaagttgacatggccacctttagggctagcaatgtgataagatttaaagttgggatgatggagcttgagtcgctgcccttgaagttaatccttactacacctaaaggtctgctgtatcaagcccactttgagctggaagaagttgttgagcaaggatggttcaatgagagtatctttgaggaagttcaggtagggtctgaaagtttcctgaaaagtggtcagaaatctggtcaaagggatggcaagcagattatggagatgggtgataagatcagtcctggtattttgctaagaggcaatggctcaaaggatgatcctacagatatgttgtgtcctactacaatgattgaggaaagtcaaatcaagtgtgctcagatactgagagacagagcgctggcttttcagcttcaggaagcagaggctaagtcgaccacagattgtggcatagaagtaggtatgaccagtggtgagacaatcctgacggaggaaacacaagttcttctgacacaagacaaaaaatgggagcaggctggaaatagagggatggcagtgaacacaatcgactctgaggcaactgaggtgggtgatgaagggatagacagggaagatgaaagagtgcacttgggtgacagtgaggattatatggattcacaagaatctgaaggaagttttgccaaaagactggggatcaacttagtggaggacaatacaggtagtcaagaagaggagatgagaaggagtaaaagactgaaggaaaaggaagacttgaagccacaagatatggccatgcaaagaaaggaagctcagaatgcttttgtcaacaaaggtcagaatacagtaccctctattattaatgaatcaaatgtctctcttatcaacatggcgaatattctgggtgttagtttaggatgtgctattgaagatgtggaaagtaacttgaatttgattaaaaatctggaatctgctagaattaacctctttatgaaagagggtgaagcagataaaaatgctgaattaaagaaaaaagaaatggaaggcatgtctactgatcaagagtggtcagatgattcttctgacaattctactcttgatgagattgaacagatgctgaaacaagtctagtcttcaatgaaaaaaagcaatcagaggaggggaaaccttgagattttcaaggtcactcccaagagttcaaagaaaagaggtaaagtaaaaaagaaaaagaaatgaaaggcttattttggaatatcaggggaatgggtaacattgaaaaaacaggtcatttacaagacctaattagggatcacaaactggactttgtggctattctagaaacagttaaacatgatttttcaactgaattgttaaacaaactaagctcagggagaaatatgcattggtgttggatggctgctcgtggtagatctgggggaatattggtgggaatggataaggacaaagtcaatgtattaaatgagaaaactgggaagtatttcataagacttaaattgttgaatgctgacaacaaaaatgtctgggattttatggcagtatatggggcagcgcaagctgaacagaaagctgaattcctgactgaattggctaaggaattttactcccaaggttcccctttagtggtgggtggtgatttcaatattttgagaaaggaaagtgaaaaaaacaagataggtggatatacaaaatgaagcttcatttttaactccatcattgatcaggcaaatcttagagaagttcagatgagtgggagacagttcacttggtgtaattttcagaactctcccactctaaagaaactagatagagttttcattaacaatgaatgggaagacatttacccccttaccactgttaggactttggttagggcc

SEQ ID NO: 784 - DNA, 2000 bp, Oryza sativa
  misc_feature (182)..(182): n = any nucleotide
  misc_feature (307)..(307): n = any nucleotide
  misc_feature (310)..(310): n = any nucleotide
  misc_feature (313)..(313): n = any nucleotide
  misc_feature (315)..(315): n = any nucleotide
  misc_feature (317)..(317): n = any nucleotide
  misc_feature (319)..(319): n = any nucleotide
  misc_feature (326)..(327): n = any nucleotide
  misc_feature (344)..(344): n = any nucleotide
  misc_feature (373)..(373): n = any nucleotide
  misc_feature (1395)..(1395): w = adenine or thymine
  misc_feature (1396)..(1396): n = any nucleotide
aataattgtcaaacttttgatactttagctagcaataacttctcaaatgttaagttttagaaagagcgtatgtagatttggttttaaaaatgttatcataataaatatatcatattttataaatttattttaatatataatttatggttaatgttccaaaagtttaaccagttcttattctnaatgttaaatacttaattatggccagagatagtagctagtcgtaggtgcgtgatgccggttttggttggagaatcgaaagcacaaaacataataatgtggaaaactgtggagggaaaattatganagnatnangnanaaaaaanncttttgagacaaatatntaaattgatctttgatttactgttttatnttttttaaaaaaagaattcagatgtttggcatgtttgcaatagaacagcatatatatctgcatttgtcaattgaatctaagtaactcgacccacaatacctttgttgaaattattctaaacaattttgtagcatatagtacaatgttatctgtcattaatccaagaaaacaaaatcaaaattcagaacactcgttgaagaaataaattctgctaaacaaactagaaatagggaaaattttctttgttttctccttgcacaaattatgtattcctttaaaatcttagggacatatttttttaattacttgcaacatagtttatacaattgtttcaaatttattctaaactttttggaacgagtttggtggttgcgaacacctcatgttatgtgttgctaggaccacataagctgctctcatgggagcatggacatgtaagttcactattagcaataggatgaacgtaccatgtatgaaaatagccatgaatatgtttaattgcagcaataacctagccacatgcgccaacggatcagtggcgagctaaaaatcgtagtagcatagtctcgtagagaaaaatatatatagcatggttatagtcatgcggtttcaacttcactatgatactcaggtgcctccatttgtaacattgatatatacgaagaaagatctctcttgtttttttttgaaaaatatgtgtgtaaaatcatggtaacaaacaaatgcacacatattgatacaaaagagaggcgcgcaaacatgttttgataggaccactatatataaagtggttctttacacgtgtgacgataagacgtgagtttcacataataacataacctcactctattccgttgttgcataaaagtaaagattacgtaagagtatcccttgctaacagagaaaaagatcatgtcatatccgttcccaatatcatacttttatgctaaaggcgaacaccgagcgcccacatcacaacacttttcgtgaaagaaaacttatatgttattaattaaaaaatwnaaaagcgtaaactattttcaagaaaagcatttactagtattgcacgaaaaaacacctttcaactaaacattccttaaaaccagagtggttctccataaagaaaacttccccaaacaaacaaagccgtcgtattgtcatccgccgctcgctgactcattcgtcacgaaatcaagtcccgcaattaatacaaccaaccaccaatacgtttctcgtaataatacaacacccccaacagagcacttcttatcccaaaaattcacctttctccttcaatcatcatcacacaccccatcctctaacctcttcctctactcaaacttttcctcctctacgagcctaccttccctcctataaataacccgtcacttcccgtttacacccacgcacaacaccacagcgctcatacccgctgcgcacacaaatccgcctcctcttccgctcgaatttacgattctgcccccctccgctccaccgcgcgaaggcgaagccggtagccatgaagctggaggtgatgccgaagcagagggccatggaggccgagcagagggaggaggccatggagatgagcgggctcgagctgtggaagcacgagaagcccgcgtcc

SEQ ID NO: 785 - DNA, 2000 bp, Oryza sativa
ttgagttgtgagaagaacaatacatgcatatgcaatagagcaatcatttattacatgtatctactccacatctattacttctattgtgggatatggttaaatctgtagaaattttaagtatcaatgtttctttgaataaggagtaaatatgagaaaacatcaaaaaacaaacaaacatggcagcattgagccatgatgcccctgtgctcatctcctgttagctctacaagtcgtgcactccacttttccaccttggtgacaacaagaaggggctaatagagatagaaacatataactaaaagaataatggtgccaagaaaaatatgtcattcaataaaaaaacaaaagtgtatcatgcatgaaaggcacttgttccaaaaaaaagaagcacatttcttacataatcaaaccatacctagaacacaccccgaaatgagctgtaaacaatggaaaatatattagtgtaaaatacataaatgatgaaaaaaaatagagaatacatatagattatcctgttatgcttcatagtgatttgcttgttttagtacatatgacatatggtagcatccatgcatctgaaaattctagacttctatgttatatactcgatatcttttaaacagagagtaaactttcactttccacaacaaaaagagagaacataattttgagcgctagtgtacaaattctgtttgtttctctaccactatatgcctactataacacatatttttaagaaaaatatagcaagaaccacatatatcacctacatctagacttcttcatttttatctaaatgataatcattactgcgatatcactacatcagtgctagttttatcatctaggatattcggcacctatattgctttgaacatctgaagagaaatgataaaaatcttggtataaaaagagtgaaagataacatagaaaattgattatgttgtggcatttgcatggataattcttttagtttggccttccacatcatatcctttatgtgattccgtcgtattccatcccttagagtgaatgataagattgctcaaaaggaaagtaaacaactaacgtttgttgtacatttgtatttttatggctgcaccatttaattttccacgtcatatgtttgatctgtaccaccatattctatcacataattaaagaggacaagaacaaaagtacgtgtcatatgcatttatccattcatgactcaattctttatccttccacatcatcaactccacctccaactcattctatccctaagaataaatgaagagataagaaagcttaagatagaaacaaatatcatgcattgtacatatgaattcaaccatggaccaccaccctcgtccaaatgtagccacataataaatcaataccaaatttcaggtgacctccctaggcatttcacttttatttttggattttcttatgctagtattaatgccatcattttttttcattctagcccttcaatttttctacatattcttttatgaagtactcttacttttctaactacacctctcattttgtctaatggaatataagttctatgtgacctcattcaacaattctatagtcaaaatatttagaatcaaattacccaaacgtttttattgattatagcctaagataaaaaataatcgaggcacaatttatgttaagacatggtaggacactaaggtatgatacaatcaaacaaaatcgagattaagcttattcatgagaaatcccactccacaagataaactaactataccagcaaataaatacacgtgatgtctgattgagtgtgatgtagacacagttggcaaccaaactaggagccggtaccgcaccgcatcgcacctagaacgactcaaggggtcgaatacctgtgggctacgattataaatagtcacttcctatggaaagaactcttcacccaaaaaatttcccgtacaatcgctatagttgaaggcaagagacccttgtaatttccaaaaatattctag

SEQ ID NO: 786 - DNA, 1999 bp, Oryza sativa
  misc_feature (566)..(629): n = any nucleotide
  misc_feature (698)..(698): n = any nucleotide
  misc_feature (746)..(750): n = any nucleotide
  misc_feature (760)..(761): n = any nucleotide
  misc_feature (847)..(940): n = any nucleotide
  misc_feature (1926)..(1926): n = any nucleotide
  misc_feature (1928)..(1928): n = any nucleotide
  misc_feature (1930)..(1930): n = any nucleotide
  misc_feature (1932)..(1933): n = any nucleotide
  misc_feature (1935)..(1935): n = any nucleotide
gatcgacaacaaatctgaaagttatccagtaaaaaacaacaaatctgaaagttatgagagatgtgtaaaactatccagaagaattgtttcaaaatagttaaaaatatatttgattggcaagttacacaataattgaactatgtgttagggttacgggtaaggtgtaccctctatccttgaatataagatgtgtcagggttatggataccacatacctaatagtagttgactaaatctcgacaggacccaccacataccatgtcttatacggaaacaaccttcggatataggaggagttccgcataaggaaggatgaatagagttctacatggaaacgactaggactatttggattatatccatattggttttcctagttctacttggacaatgggacacctatgggtataaatacaaggccccctaggaggagaggggacacggaacaatagatcaagacacaaaatcaacatacaagccaacacgccgccaaatatcaacatcaaagattagcttagacaaaccctatcgggggtacctgcgggggccggcaagaggggtcaagnnnnnnnnnnnnnnnnnnnnnnnnnnnnnnnnnnnnnnnnnnnnnnnnnnnnnnnnnnnnnnnnttggttatctagccatcaagtcgacgacagccagatatgttatcccaaatgttgtatttgtgtgatccnagatgaataaagagcaacaccggcttcggccaacaggatgtaggttannnnntgacaattcnngggcccgaccatgtataaaaatcctcgtctctgtctcttttacctaagtctcgcatatatcctggtaccaacgatccccataccannnnnnnnnnnnnnnnnnnnnnnnnnnnnnnnnnnnnnnnnnnnnnnnnnnnnnnnnnnnnnnnnnnnnnnnnnnnnnnnnnnnnnnnnnnnnnaaatctatcctgtgatagtaacggaatctacggatggaaggagtcttactcgggcaagactggggcaagactgggtctttaccatatcgtgaggggtccgatatctccgagttctacttggagatcaactgacccacggtataaaagggacccctgggcaggacctaaggcatcaaatctcaccaccaacacacccaccacagcctaccaagccggagcctacaggagccaagtcgccggagatctagtcggaccaactgactacggtctcgtcggtatcatcgagttctgttattccctttgtaatctgtggtttccatcatataatcctataccaactggattagggctattacctgctaaggggtctaaactagtataatccttgtcttttgtctgcttgatgtcgtactacgtagatcctcgtaccgacggaccccaataccctctatatccggtctacgggtatccccgtcgacactatgaaaggcatgttatgcggcaaaattacttacaccaatatgtttcattgattacatgaaaacaaagttacaaatatgttatctcacaaaagttacttatcaactgtagtgtgccatgtaaagatgacaagaaacctacatatttgttattttgaagaacacctaacttatcaagtatagttggccacgcaaaaatgacaacattcttacaagtttgttatctcaaagttagactcatcttatcaagtataagaactttatggggtaaaaacaaatatactcacaatgcaaagacatacattaagagtatggatagacatgttaacaaactttatttgtatttcttcaaaagcacaaggagtgtgtcatggctgagtcatgaaatgtacaggtcaacttgcaaagttgcaataccctatgtactattttagcaatacaagtcagatattgtctatacatgcaacaaactctatcacctaaatcccaatatgccttttctttgcnanananncnagcttgatctatcattgaactcacatcaattagcttaagtttccattagcatatacagaaagct

SEQ ID NO: 787 - DNA, 813 bp, Oryza sativa
  misc_feature (144)..(144): n = any nucleotide
  misc_feature (148)..(148): r = adenine or guanine
  misc_feature (149)..(149): n = any nucleotide
  misc_feature (161)..(161): n = any nucleotide
  misc_feature (165)..(165): n = any nucleotide
  misc_feature (167)..(167): n = any nucleotide
  misc_feature (171)..(171): n = any nucleotide
  misc_feature (191)..(200): n = any nucleotide
atatcttgattatcgcgcgatgtgtgtgtgattttatggaaacctggttgagatgacatggggtctctaatccagttctctctgaaaaacctcgggaacaccagaactcctctcgctgctgataacgttacgttcagagcgcangggrnctagagttcatngaananatancactgatgttagtgaccgannnnnnnnnncatgacaaggctaatgtgtttggcacgtcatggattgcgggtaaagcgtacatctactacagtatgaatattcttaaagctattcgaataggcgtgctcgcggttatcgggcattgggactcactatggcatcatggatagaaacctaattcgaaattttattaaatactgttgcatttaaaatattacaagctttctccttctactttctcagctttctgcaattaaacctagctccactcagatactatttcatacattcatacttgatgcaatagcttgctgagtacgttgtactcacccttgcttcaacccctctttttcagagtctaattggagtttttgccgaagctgggagttcaatcaaataagttagtttcctttaaacctagtcttcaagtctaatatagttagacggtttaattctatagtaaaacaacatagttgggtcatcgtatagcttctgtggtagtagttagccacaaacttttaaatgtcctcttattttatataaagacatctccttcggagccttgttcaaatgtacgcaatgaagatccagattgttgaacctgtatcaatctactgatccagggcttgatacagttttaat

SEQ ID NO: 788 - DNA, 2000 bp, Oryza sativa
tgaagtctatcctatcctccacgtcaatcacatgcaaccacgtgcgatcatgatctgcaggggaaactattctaatccctcgaggggatgttccctcgtttgtttaaaaaccatccaaacggttatgaaaaattctggaaaaatttgacaacattcatacaacacatatatacaactctataaaatcttaagttcaaattcaactcacacgtcgagatataaaaaagacaaattcagcatatgaatagtagcgtactgtttatatctaaatttgtcgtttttgtttctagatgtgtagatcgagtttgaacatgaattttggtggactagtaggtatcattatactctacattattaatttttttcagatttttttacaactatttgtattgaatttggaagaaaaatgtatacgagaggatatcccctcgagggatcagaatccactccctgatctgcagttagagatagagttcctattatctagttaatcttgttttgcatgcgatgtaatctcttccaggttgttaggcagctccctggtgatcgctcccaggttgttgggcaacttcctggcgcacatgtaaagccacgatcggggctgttccgatctaattaacgcgaacgctccgcacagcgtgagtgcgagagtttccatccaatagagaaaactcacaggatggaaccgtggcagagagcacgtccaaggagctgtccgccataagcctgacgcgtgcgtccgtcgaggttgtcgcaacattagtggggagaggagcggatggagcggacaagttaaacatggagacaagaggcattgagggagaagctagcgagttctctagcttgagcggggcaacgatttggagacaacggagctctctagcttgagcggcgtttgtatgcgtcgcgtgaagggggacggcggtcggtggcttcgacaggccaggagcttggcggtgccgcggtggcgcgcgtggatgtagcatctttagcggttctccagtggaacagaagagatgactctaacaacgagatgaacacagcaagcaaaaactccacctccatgcttcagagcctcgatctgccccactgtcgggaagccagctgctccaatcttgttggccacacctgcaccgcttccacccctattgaattcgagctatgcgggaagggaggcagtggcatcggcagtcaacgagcccagtcgaggtcgagctcgccctcccttctatgacggcgcctcgctcagcaagaagagcatgcggcgggcacgccgcggtcatcccctcaaccaccaccgccattacgactgtcgccgagacaactgcaaagatcgatggcacaacgaactggtcaaaaagctcatcttcttcagcctcatggcgctggcctcaccattcgacctggaatacttgctacatgcgttcgcctcccgtctcctccattgccctcctaccgaatgccgatgcatgagtctccctgtcgttccccgccattgctcttctgctgccgcgcatcactcttgtttttgtcgctcaatccaaagaaataaataggaatacgaaccctcgtccccaaagcccgggtcctagactactacgaatagaaagatttctacggatattcttcgtatcaattttataatgcttatcacctccttctgagctattcccacggtgccttcgggtcaaagcttaatccttaatagccaaccgatgcctggcaccaccgctaagcacaagggcaagaaaaagattggctttaaaagatccaaatacttccttgtgggtttataaaaaaccatatcatatcgaagaacttgatggtctttctccacccgttcgattacttcttaaaaggattagatatagaaaaaaagtagtctactcaggagaatgagataatgctcataatatcgctagtaaccaaccacaaaagtaaaccaccgtgcaaaggaaatatgggaaagagtgaagtaaggaaggaaaggagtcactgac

SEQ ID NO: 789 - DNA, 2000 bp, Oryza sativa
  misc_feature (143)..(143): n = any nucleotide
  misc_feature (147)..(150): n = any nucleotide
  misc_feature (811)..(812): n = any nucleotide
  misc_feature (828)..(828): n = any nucleotide
  misc_feature (834)..(910): n = any nucleotide
  misc_feature (912)..(912): n = any nucleotide
  misc_feature (915)..(916): n = any nucleotide
  misc_feature (937)..(938): n = any nucleotide
  misc_feature (945)..(945): n = any nucleotide
  misc_feature (1418)..(1418): s = guanine or cytosine
  misc_feature (1422)..(1422): m = adenine or cytosine
  misc_feature (1929)..(1931): n = any nucleotide
  misc_feature (1933)..(1935): n = any nucleotide
ttatcgatagcacccacacgttgtataacatatgtaccctggtggaataattagccgtaaaatacaagcacccatagtctaggatttgaactcgagtggtgatctggttccaccacaagaaaacctaaccagtttgtaaaatnaagnnnnataggtgtatatatttttaaagacactttaaatgttgcctaaaatatttttaatgtagagacactttagagatatttttattcatattttctcaaatttatcttgtaaatgcatgtttttttcaacactttaaaatttgactaatatgtaaaggcatattctcgaggtatttcaattcctgtagaggtactttttggaattttaatcgaccctaagtaactagatatgacataagagtggtatgattagagcaagaggcatcgagttcaaggatcaccaattgtatggaaagagatagtattttttttccttggtttgctatggttgtggctttttttaatgtcttagaaaatacctttaatgtattttttattgactattgcatctagaaaaaaaataaaaaaaacacgagtgatggagggcaatggaatggtaaaaatctaaacattctatataaaagagtaaattgcgctagcaagcaagttcaacaacatgcaaattactctttttggtataatgacttgggtagtccgtatggacctgtccaaaacaatctgtggagattatgggtaccctaacccatacggcatggttatccgactagttttaggggatagcttatatctatggaatatgtaacagatcataacttgggtattanntttacttttatattanggagcnnnnnnnnnnnnnnnnnnnnnnnnnnnnnnnnnnnnnnnnnnnnnnnnnnnnnnnnnnnnnnnnnnnnnnnnnnnnntnctnnataaggtgggcaggaggcccnntaggggncatgagacacaactagatcgtcagatctatactacacccggcggattcaaatccccaaacaggagtagggtattagggcctgaacctgtctaaatcctttgtctccgcatccatccacttctaggtctcgtgcgctacccccttttattattgccgaattcatgtttcgacagatgacgcgccaggtaggggtgcgtcgagtttccgtcggtaaagtgcgatggaatcaatcatcaacatgaccggatcgtacacgcgcgtcatccaccgtcgcagtgggctgcatcaccgccgcaaggaggacggagggcgcgtctcatcagagcgttgagcgcctgccagatcgagatatcgcgccgatcggtcgtgtgctgtttggacttccggatcggcgagcagctacacgtgacctgcagcaaccagccgccggcacatgatctccgtcgacgtcgcttggtctaattcaatccggscgamcacctcgatcaatctacatccatgcagctgtatagtccacgcgtcagatcgatccgcatgtgcatcacatgacgagggccaagcagggagcaagaatatggcatatgcatctaatcttctttctgctaattagattgattattaaatcagattgattgatggtctttttcttctttgctctttcttctggtgtatgcatgttgccggcgaccaaggtgttcaattaggcatggcataattaagccgtcgcaacgcatggcgaagccgtccactctctgagcgaattcgagtcgtgggctggacaggcatgcacgaaagttcacatgacaagatcgctggagatgtacaggatgtgtcgattcaaccgccatgcatggattaattaatccagccatacatgcattcaatcgctgagatttatacatttaatttgctgatattaatcagatttatttgatttgtttccatgtgaatcgcggagcttcaccaatggacgtcctgtggctnnnannngtcacacatgggaacagccggcctatggcttgtcaggagagaacacatgcagaacatgccgagct

SEQ ID NO: 790 - DNA, 2000 bp, Oryza sativa
  misc_feature (1163)..(1163): n = any nucleotide
  misc_feature (1167)..(1167): k = guanine or thymine
aggagtcagcatcttctggcccagccttttttgcgttgctacactttagttcgagagtctcatacatacttgagccaccaactatatacctttggagatttttcttattttccctcttaggcacaatattgacatagtaaaagtacatcataaatttaacttcaagagctaagctctactaattaaagtggtcctttattcttcttattgtccatgtaagaatagttcagtgagaagagttatttgacccgtgtaacttttaagtcagcaaacatttttgtttgactccttgtcctgtctattagcagcctagcatggcatctttagttgaactcttctacaagggactacactatctaatgtgttatcacagtttcttatgtaatagaaatgcaattcatgtcatttcttagcatctaaatgatcaacggatagaaaaaaaattatatgacgtgtataactcatgctatatctgaaccttcaagtgtaccttcttctcatgatgcttctcccaatggaaagcatccctttaacccttccatccatattggttcttaaatttccatgtcttccatcagacagagaacatataagttctacaacctcggtttatccttagaagcagaaatgttcaatatgtcaaaggtacaactccgtgtcctttgctttgaaattcaacatcacttgcacaacatgtcttctgcatcttcaggtactccttattaacatttcaagactatctatatagtattttattttattagaaatgccacgaaaccaccatttattatgcaaatgcaggctatagtgagattcggcttccacaataacccacgaccttgaaagctgttattaagatctattagagttggacacaatctttggaacatgattcagttatgttgtgtgtttgactccacatttgggacacgcgggaattaggttgggtaagcaattgccatttcttccaataatctgatggtcaggtattcaggttagtgaatggttccagacatattagttgcatatatataatgagtaaattggaagttatcacttttaatcatcttaatcctttgtgtcattctcacctttacaaaagggacatataccttctcattcttctcccttttctcaaactgttataaacttataatagtttncttkgttttctctagcccttatagtttgttgctgttctaactctaaaaatgaaaactaaaacaaggggaatttatatctttgggaatactacctagctttttatcatacaaatgttgtgtaatacctttaccagggtattataactgttaatactttgaactgagctactaatgacattgcaggtactaattgattcttccctgtaatggagagttttattttccttgatttaccaaaatcaagcttacattaaggtgtaacaaatgggtgttttgggctccataatcattttgttgatgctaaatgctgactactggtgcagcaaatggaagagctcttccagttgatatatgccatttgaggacatgtgctttgtcctcagtataagaacattggcctaacatcattgttggagttgcattgcccttagagtggggaaagcgacacctcttgcaagatagtaacagcaattatatcataaattacaagtcaggccttccaatgtggttttggatgaggcaattgatacattgtcatttgatgctgaattttttgttcgtctgacgactggaaagggggcacctacgacgattagcttagtacttagtgatggtgtatgaagagcattgatagtctcatggcccattgctaacatgtagagaaggattttgagttccttggaagtattgactggaggagtgtgaactacttcgcaaatagatgggtgtaaaatctgggaaagaaaacttaaagagctaaatgttttctaccatattagttgatctgaaggtgctttccaagtcaaaatcagcttagcatatagaattgacttggtg

SEQ ID NO: 791 - DNA, 1999 bp, Oryza sativa; identical to SEQ ID NO: 742
  misc_feature (1005)..(1005): n = any nucleotide
  misc_feature (1024)..(1024): n = any nucleotide
  misc_feature (1029)..(1029): n = any nucleotide
  misc_feature (1909)..(1909): n = any nucleotide
  misc_feature (1911)..(1911): n = any nucleotide
  misc_feature (1913)..(1913): n = any nucleotide
  misc_feature (1919)..(1919): n = any nucleotide
  misc_feature (1923)..(1923): n = any nucleotide
  misc_feature (1931)..(1931): n = any nucleotide
  misc_feature (1933)..(1933): n = any nucleotide
  misc_feature (1968)..(1968): n = any nucleotide

SEQ ID NO: 792 - DNA, 2000 bp, Oryza sativa
  misc_feature (532)..(532): y = cytosine or thymine
  misc_feature (533)..(533): n = any nucleotide
  misc_feature (535)..(535): k = guanine or thymine
  misc_feature (536)..(536): n = any nucleotide
  misc_feature (539)..(539): w = adenine or thymine
  misc_feature (540)..(540): n = any nucleotide
ttgttcagaagtctgtaattaacactaatattcccaaaaagagtttgtaatgatcacttatgaaattttgttaagcctgtacatcttgcaatgcataaaatttgttccttaacgtctgtttcatgggaagggtaatatactctaaaagttgatctaattaattaattaaactccgaattgcctcttgatcaagacagtaacatactattaattcttacctgctttctgcctttgaatgcagaagctctgaacacataatttgtgctgttaattttatatttgaaacgaattcacatgaattgctggtttctgtctattagagcatgtgttgggcgacgcatttgcggggacgtgaagtgtgatgttacatatgtagtggtgtatgatatatatgtgtctgccttgtgataaaaaaaagaaatgcccatgaatatatgaagctgcatgtacatatatatacatcctactagaaagaaaaaaaaataccatagtcttttctttgatatatatgaaagcatttacttgtgtttcyngknaawnattgttccctcgctacatttacttgtgtttcttgttcaagctaggagaaaaccaagccatcagtgcacgcataagtaatatatcgatcaggcagagtcaggaacatatatgcatatcttcttcgcttaattgcatcgagacaaacattgtcatacttcttgggctgttgtagtagcaagaacagtgctgtcgatcaccaggatagctgcagcttcgcatggctgctttaagcaaaaacaaaaggtgcttttacctggcgtgtttggagatttggcgctagcaaaaaatgctcatgttcttcttacatgcatatatcttggtcaatttgtgtctgccatagtcttaaaaaaagtttatatttttcagtgcacgcaatcaattaattaagcaggcattttctaatgcaaaataaaggtttgtgcttttttttcttcaacaggagggctcggctaattaggaaattaaaaccgtcgatccctgtttttataagatgccacataggttaaaccgatcacatgacaataaaatatatgaagagataaaggttacaatgggttttataccggtatacacacttacctatgtcttggacaaaattaaaactcacaatttagcaacactatagctagtatatgaaacccaatgctctagagcgtacattgtttaattcatcaactcaaacctctctagacaacgcggcactctttaaaactgtggaattaaactccccataaaaaatgaccttatgttcaactcaccccgaaattattaataggcttatttcgaaatgagagtattacactttgaattcccaaagccattaaaattttcatgctatgcaaaagctttataataagccaaaagaaatttcagaaaaaaaacatttatttcgcaagctgtgtcattgtcatcatgcactagcttgcaccatatgagagacctaccaacaatcttggccgtaagtaaccgggctctgatcacgagaagacagcgtctccagtggcgtcactccatctccagtgagtcatcagcagccaggggcaaatcgggaaacacacgtgcagccaggggcattttcggaaacccccgagcattttaaggcagcaaagagagcattgcatgcatagtgtgagcagcagcttcatcacaccgagctcgcaaaaaacacaatcaatcgatccccaattcgatccccatgggcgccgcgatcagctgctgtggctgtcctcctcgccgccgtgcaggcgcggccgacgacgcggcggcgggactcaccgacgacatcctcgccgagatcttcctccggctgccgccgcacccggcctgcctccgccgcgtctccctcgtcagccgccggttccgccgcgtggtcaccagccgccgcttcctccgccggttcagcgacctccacggcggcgcgccgggggctcccctcgtcggcttcttcagcaaccacaacc

SEQ ID NO: 793 - DNA, 2000 bp, Oryza sativa
  misc_feature (166)..(166): k = guanine or thymine
  misc_feature (244)..(244): r = adenine or guanine
  misc_feature (1517)..(1517): w = adenine or thymine
ttgtttctctttttttcttttcttgattgtttaaataaaaaaaaaacttaatagggttggattttttttggggaaaatgaaagaaccctattgctaacgtgcctggattgaggaaggagagggttatatatggaggatgagatggtataattagagaagaggtttkaggcgaggaaataggcaagaaaaagctctgggttttttttttgtgtgtgtttgtgtgatttaattattggtggttaaraagcttgtaagaacttgtgtgccatcaagtgacattacttggtttttaattgtgtaatatttggcgctctattctttgtagggagagacagggcaaagggttagttcaaattaataattcctgttgatcatttttttagattaattgatttttattaattcagcctctgtatccacgaaggatatacacagccattttttttaggaatacacatattattgtattataaacacctctcaaacaaagattgaaaaggagataaacacctctcaaaggtctaattggattcaattcgtcctccagtatatcccgggattggacactgtcatcgacgtcgtcctatttctctgaagctgaaagataaagaccacccagatgaatcacaaattcgtcgaaaccgatgaaccaaattaaatgggaaaattcttcatctaagttcatacagaaaaaggacctgggtcttttcatcacgagctttgaaaagattgtagacctccgagtgatcataacacttggccatcagctggtacagctagctttgggattctaggcgaaaacggaattaaatcacaaactgataaacaaaatgcaaaaatttgaatttcttttatgttgatttggataatcggaggagatcgttgaataggcgaactgaccgtgctgcatcacaaccggtcgtgtacacaatcatttttgcagaatgtgggtgacgtacggtgtgtgacaatcagaaaaatctgacttttttttaaagatgcggacatccctctaaatattttttcaagaaattgtgagcgtgttggggattaaacatagaacctcggagttgaaactacacaccacttaccgctacactatcaaatgcatctcctactcttatcgtatcaatgtgcttggtagagccaaaacattggataggcatgtacatgaaatgtgctttcaaatcataaatttgacacgagtgttcgtatttatagctaattattctttcaatggtaggcgatgtacccgtcgacagcgatacgcccgtggtgacttcgttaatctcaagatatactgacccagtctttcggatgtcctcatatgagtagggtgtgcattcataaacggatgagtgtgcgtgtgttatgagcgtctacatttgtactgtgtttatagaaaaaactttggataggcataaacatgaaaggagcccccatgtgatatttacgtctcgcgtgggagcaacacaccctagcaaggattgcgtggtgccaccaggacatccgtttcwatctctttttgcatctcttttctcaactcaacgtacacgcgtaagagttggttttaactttttttcgtccaaattgctgaaattgccaaataggacattacatgtccaatgagtccctccaaactccgttggcaaattgcaacttttgcaaatcaacctgtacatcgtacaccacctgtatatatagacagaagcgcacataggacagatagctagaaagaagaataaagcatatacttttaagcaaaaacaaatgtaaagagcatgtcaccttgtcgattctctatggtgatagggtccagggcaatgccatgtcatgctatcttatccctgtgctttgcacacagctttttcaccaaatccctgcaagaatcctcctataaatacccacccaattgatccatcaatttcccatcacaaaacacataaaactatatcatcatcttccatagctgtacacatcctatattttcattcatggcg

SEQ ID NO: 794 - DNA, 2000 bp, Oryza sativa
  misc_feature (161)..(161): n = any nucleotide
  misc_feature (176)..(176): n = any nucleotide
  misc_feature (194)..(194): m = adenine or cytosine
  misc_feature (196)..(196): n = any nucleotide
  misc_feature (204)..(204): n = any nucleotide
gaacacatatataaaaattttacctatacattaagagaaaatttcacgaaactacatatactttgatcaatctatcacaaaactacagatttaaaaaagtgtatcataaaactacaaatttatcatcgtatttttttcctaaaactacatatttaaggtanaatattaaaaaaatnaatttatcatatttatcmcnaaacaatnacttttgcaattcaatagtgctacggatataaactctaagtttgtagtttttttataattttatcactaaatctgtagttttgtgatatgatgttctatatctgttgctttgtgataagtttagcgctgaatctgtagtttgtgatataaatttttaaatatatagttttgcgatagttcgatcaaaatattcgtagttttgtaaaatttacttataagttaatttttatttttaataagttaaaatgacttattaggaaatatgggcaactaatgactttcctagttgtctgctatcgtgcattgcagacgtatgggattttcttggacagttgggccaacaaattaccatcgggtctttcaacatgaaaatctgaacaagggcccgctgagtgcggacgagtccgacgactttgggacgagtcgtgacggtcctgctggagtccctctgcaccatagcggttgcatccaacccatcccattgcaacacggcccaacgtccaaaaggaataagttaatttttccttcttcaactaacgcccaagatgattttcacccctcagccagcctcatccattaaaactggctcattttacgtccctgagcggttttgtccaactacataacactcacatggcacattgatagtctgtcactctgtcctacgttgagttttttttttttaacagccggtcagaattgattggcgttatattgatagaaggagaaaaagtacagatagccaaagggctaagaaagagaaaaactatatatgacaacatgcaaacaagcttgcacgtagacttcctagctcctcgtgacaacattctcccaatgtgtttagcgccggccatactccaccaacctaattcctcttaaatgcgactaatcatctggtgtacggtcgcctcctttgctctaaagattcttgcatttcgttccttccagatttcccaagcaatgagcaagaagagagttctgagtcctttctgttttgttgctttcgggtcgcatgttccttgtgtccaaaattaaacaattcctacgttgagtttaaacgggtggttacgtggcaatatggtcagccagataaataaaaaataatggaaaaaaaattgagctccatatgtcaatcagcaaaatagacccacgtgaccccacctctttctctctctcctcttgccctctcagcacactgctcgagccgacgacagcgctcctcaaagtctagctgccccagacgcgaccacatggtccttccttcacctgcgtggccttctctgccgggactgccgggagtatgtgtcgtaattataaatctgaaaagatgtgcacttttttaatcacgtttcgtaacaaatattaccagttttgctgtttgtcacttgatattttcacctgacttgtcttctttgctttgaatccttctgttttcctccattttcctctatcctttatcctttttctattcctgaataaatcgtggaatccaccgagtactttgaataaatcgtggaatccctaatttgtcatcgagtctgatcttcatcctcggtccaaaaaactggatagaacgtatctcctaacttacaaaaccatgcaaacgaggtccctcgatagtattgatctcgggtttagctgacgtggcgtttatatggatcgtttaactaagtcttcgttccacgtggcattgctgtgacgcttacatgtcaattcaatcttgagaaataatacaacccgtagggcccacatgttagttacacacaaaaaaaaatgatggggcccatgtggctcgc

SEQ ID NO: 795 - DNA, 2000 bp, Oryza sativa
  misc_feature (112)..(113): n = any nucleotide
  misc_feature (116)..(116): n = any nucleotide
  misc_feature (126)..(126): n = any nucleotide
  misc_feature (131)..(132): n = any nucleotide
  misc_feature (135)..(135): n = any nucleotide
  misc_feature (138)..(139): n = any nucleotide
  misc_feature (144)..(145): n = any nucleotide
  misc_feature (270)..(270): n = any nucleotide
  misc_feature (295)..(295): n = any nucleotide
  misc_feature (315)..(315): n = any nucleotide
  misc_feature (658)..(660): n = any nucleotide
  misc_feature (662)..(662): n = any nucleotide
attaataacttagttataagaaggggataattttaatttactacgagctgatgatcgagattcatatgcaagggcgttgatcagttaacaactagttattcctcatcagagnnccncttattcctntctgnnctnatnncaatnnccaaacaagccttaatttggtgggggaacaaaatagtaaatactagaataatgtagcgagtatattatgctattacagtcaatttactaccttaattaactctgataccatattgagttttatanatataacacacttactggaaatttnaggttaatggagaaggacanaatatggacaatatttcacttatattggttatgatttagaaaattaaggtcatgattcttttcccaaaaaaaatatccaaatgttgatgaggccagctgagaattaattaggaccatataatatatagcattattgtagcagtgcaccggagacactcaatataatttgagatattagtgaccatatattattatcaatcacacattactggttaattgaatggctcaatggtccgtcgtcccttcaattccccttgagagttcgttctcacatcgatgttgtacctagagctagaaaggcccacggcattactcgcatggcgccaaaagccctaaaagcaannngntttcagagctgtccttataccctacatatatatatatatacaacttcaaaagcccatgcattccacaaatcaaaaacctaactgcagatgtatgcattgtgtcatcaaatcaacagtgatcagtgatcaatttcagagaaagaactaagtggaccaacttcagaagaaaaaagaaaaaaaaagaactacctacctgcaacaagaacactgataggatggatatgatggaatgatgttgagttctgaagagagatcagcttagctatggtacttgtgtatagtagtagctagattatatgagattaatacatgtagagacagggaatgccagttttcagcagggtgagctacctagctaattaagctgggattagttagagtgatacagtgttgtgtaggcatgcacacacacacacaatgacacaaacatatatggacctgggttggcttgataactgttgacaaagataagagggatatgagatgtcggcaagagaggaaagagacaagtcaagtcattccagaatgaatcagcaattattaatccctctaactaatgaaacacacacacaaaaaaaagctaccagtagctagctagaacaagatgcattccatctatccatccatctatcagcagctggccgcctggccctaaagtgtggccactttattatatttgcacaccatctcagatcttagcacagtgctaattaagttgctgtcgtttccaatctgatcattactcgattgaactgatagtctctcaattaaaagttcagaattcgggagctgtatattttgatcgctttcaagaaaaagaagagcaccaagtcccaaaaagagagaaattcactgctataatttgcagaaaaagcttaatgctacaaagttgtaatttttatgatgaaattgcatccattaattttcaaataccagtacttcagcacttcatattgtgagaccaatgaggtgaataacgatgaaggcccaagtttcaacatatatgtccatgaaagcccacgaaatataggatcacatatggccgacaattcaaggcccaaaattagcacatatatatcaggaataagttcactttagatccatcctcttgacaccaagttttccttcaagcttagtactaatatataatgtctctcaacctgcaaaaccttctgtacctgagtccgaaggtctcagggcagtatggtgtccagttttggctggcatgataggtagaccccacatatcagtggtcaactattatttcttctctctcccacctcttccccatatctcatattcttaccaagcaatcgagtggcggccgacaggagggcg

SEQ ID NO: 796 - DNA, 1999 bp, Oryza sativa
attttgatgtcgattgtcccattctctctaagtgaaacgccaacaccaattcgtactagctaggttcatccatgtaagcaattgagcggcagccatctgataccaaaaagacaaaatagagataaaggaaccatagccattggatgaagaatgaccaatggagctaattggtcctcatgagtcatatccaaatgggagcggttgttcaaagactgattgataagtatataagaaaactagacgttggggcgccgtaatggcacgcctcctgattacttcatccaattacttcatttgctccttgtactttccaaggagaatgcttaaacgtatatgattaactacttaccacaaatgattagtacagtagcagcttgagccgtgacatctttaacttactaactaccattaaccctaggtaatcagtgttacacaacataacgttttacacaagctttcttagggcctgttttgtagagctccaactcccaaaatttagcttcaggagttgagtatggagtggagttgtggagctgcctaaacccaactacacctctctagttcattctatgagagcgcttcacctagctccgctcccattttaggtggagcagaaactatttggctgggctttagctccaaaaaagctggagctggagctgtgccaaacaggcccttagtacacggaagccttttagaagggccaaaacgtgtacaagattaaacaatttcagctagaaagctttcaccacataggctaacaatcatttggaaccacaaataaggaagaagtcaatatttattaaagaggattgtcttctagtttatgcaattgtgctaatcttgtgtaggtacataaacgggattctcagctgagaagtgaggaccaaactgagatgaacaagctcatttgttgtaaaggtcacttggagtatttggtcaccataatcatacattcattcatgggtgtccaatttgaaaaagtttcaatgtttgtgcagattttatttcttcatggatgccaactagtcagcgagtaactttatatgtgtggcatttgtagttgatgattgtactattgatgtactcgtagcaggtagcaacaaatatgatcaaaatggattcttttcatcataaggtaatggaaaacgattttctttatggaaaggatcagggaatcaatttgctggataaaaagagccttgaaattaatcgggtattagcacaactacagatttgatttttccatacgaggcctcccccaggctataaatggaccataactgaccccgcatgcaaaaaatcgctcccctggggggcggttcaaggccagtctgcggtaatgtattatcgcaagtggacctcttattgtgcaatgacccgcaccgagccactgacaccctctctccacctccctctctctagctatcccgtcctctctctctctctctctctctctctctctctcagcgtgcaatggcagagggcggcgaaggtcagccttccttctcctgctctcccatcacctttccccctccgctccgatggtgactgagcatggaggcaacggatcgacgacgatttctttgcctctcttgtagacccaccgctgactggccttgagaggggtggatccggcgatggcatggcaaagaggaggcggcagggaggttgagcgcagccacatgaggatggatgatgaggacattactcctttggatacgcaaaatacttctcatgttttcgtacaaggtccaatcactagagctcacacccgacaattgcatttataggtgagcttgttcctaagtacttcttcatgtgatttttaggaaagattgttacctaataattttattatgattaggaactatggagaagaacaaggagagaagctagaagatggacaagatcatcaagggcattcaagtcaatatggaggcccaaatcataccatgttcgagtctacctcgggctccctgagcagtctgtgcaaaaa

SEQ ID NO: 797 - DNA, 1999 bp, Oryza sativa
  misc_feature (1628)..(1629): n = any nucleotide
cgcacaaatataaacaaatatattgactatgtttgacaaatgttttttaagtatgatttaaaactttttatatttgaacaaattttttaaataagacgaataaaagtttgtcaaaaagtcaatagctttatacgttaaaaaacgtaggtattacgtaggaacttgggaaggtgtaaggggaactgaccacgcgcggtcatatatcagcatcccctcgatctatgaaaacatagatcgcaccggctttggcatataaatactacggacggagctcctctgacgtaaagtcagagagacttcataatgtccctctgacttaaagtcagaggagcctcgtccaagtactaccactagcatgttccatcgatggcgagagagattagtagagggggcactcaactttgccaaatcgcccatgggcgaagtggccaccaccaccctgctgctgacgagccatgaagcaaaaccggccaaggcaccgtctatccacgacgccatcgaggtgtacatcggcgccaccggcgcccgccaacttctcaaggccatgctgctggccttcgcttgggctttcgacgcgcagcaggtgttcatgtccgtgttcacggacgcggagccgccatggcactgcaccggcgtcgtcgatgcggttgaggcggcggcgggcgactccggctcgtcctgctcttcgccggccacttcggcttcgccgtgcgcgctcccgctcggcacgtgggagtgggaccgcctggccaagacgtcggtggtgtcggactgggcgctcaactgcagcggcggcggcccagcgctcgtctccctcccggcgtcgtcgttcttcacaggaaacctcgtcgtcgttcttccatacagtctcatatgtgcaccaatgtgtgaccgcgggtgtgagtcccgtatgtgctcgtgtgtggggccggtcagtgctgaggagcaccaatgtgctctagtgcttgtgcacactcagcactcaggatggtgtaagcccaaatcccagtggaccgcgggtgtgaggtccgtatgtgcccatatgtgtgtgcacaagccgcgggtgtgagtcccgtatgtgtccgtgtgtggggcctgttagtgctgaggggcaccaatgtgtgaccgggggagattgctgggaatagtcccacattgctaatttagggggagttgaaccaatttaaaagtagagggagtccctcacctcttgagctagcttttaaggtgtagcaagactttctcccggttagaccaacgtcgggggaatctaatgggcgggtgatcgatcaacccgcccctccccctatactcctctctattctttcctttcatcataaaattcaaaaaaaaaacaaagttagtaaaaaaataaaaaaatctaatactctcattcatgtgcatagactttatactgtaaactttacacgcataaactttatgtatagaaatattttatatacaaaatatttgaatccgaatttgaatttgaatcgggcatataaacttttgacttataaacattcgctctataaactttaggtggataaactttagatgtataaaatttaggtgtataaacttactaaaaagaggaaattataaaatatttggattcgaatttgaanntcgaatttgaatcgggtatataaacttttgacttataaacattctctttacaaactttaggtggataaattttagatgtgtaaactttaggtgtataaacttattaaaagagaaaaagaaaaaaaaaagaaaaaatacgatcgatcgcccgttggccttctcgaccaacgtctcctggtttcggctcaacagcatctgctcggcctggctccgagacgtctgcaggcatccaaacaagcttgcaagttgcatccggagatgcgagccaggctgatacagccaaccaaacacgcccttaattttccccgatactaccactggcatcgtgagagatcagtagaggtgagcactcaacttcgccaaatcgccc

SEQ ID NO: 798 - DNA, 2000 bp, Oryza sativa
agatcaaaatctttatctggctcatgctaaagggtaaaatcttgactaaagacaacttgtttaagagggggtggaggaaaggtgacactaagtgtcaattctgtgatcaacaagaatccattcagcttctcttttttgattgtgctatggcaaggctgatctagaacattatctcctgtgctttggatttgaaacctgtttttgatagcaatcaactgtttagctcctggatttctgcttttggaaagaaacttaaaaaacttgttgtcactggtgtggctgctgtgctttgggccatttggaaatctagaaacaaagcctgttttgagaataaactccctaatgacccaactgatgtgattttttcggtttgtcattggttggaatcttggattccattgcagagactggaggaagatcaaagaaagttgctcttaggagccaaactcataagacaggtggcaagtgaaattttcaactccaaggatggatggagggccgctacaagaaggattggatgctgaagattgttctctctctattggtctggatgtcagctgcaactacaaaatttagggttttgggtggtgattgctgtatttctgaatcaccagttggttatgtttcagggctttaaattttagagctatgtgctgctattctgttatgtttggtgtcatctacaaaaccagctatcttgatagcttgtctgggattgctctgtatctgaacctgaacttttgtagtcttctcatttctagtaatggaaatgggggcttaatgcccttggtcaaaaaaaaaagatctgggattattttgggactggacgatcagtataggaattaaagcagggatttatatttggttgtggtttctgacattttgaaggagaactaccagttagtggcaaggagaaaagaacaaaaagctcctgtgatttcacaggacacatcacgtgcttgtgcagaggcacaaatgaactaatgatggtgaccagcaagacagcagcttcgctaacagcacttgccgacacaagaatgtggtgacactggcgaatgcctccggtgatcgtcgccggtgaacatgacctccgattgtcaacgttgttgaggagggagatgcagcgccatcgctgagataggaggaaggagagtgtcttaccacaacgacgccggccctaggtgagcaagcggtgcagaccaagtgtgggaattggctctatgagcctttgagagtttgagaacgcagaaaaatggtggaagtctgtttatacagtgagagaaggaatcaatgttgagtggaggagttatctggtgattcaattgaagataatgcaggggaattatttggctcttggcttgctaacgtatcctgattgatgacccataggtgattaaactcatagtggatggagagagcaatcaacagaggattaaatgtcaaatgtttgcattgataggaagatgtaaagtctgggtggttgatttgctcttcatctcttctttttttataactgctggttcatgggattaaagcaacaatatttgggataggagctggatccaggtgttggagaggaagaaacagaaaatattgtttcagtccgtacgtgaaaaaagagagggagaaatgaaaagaaacaataggaagcgaaaaaggaaggaaaaggaaggctttctgcacaaatgatattttttttgagtggttattttaggaaataaagggagttagaataatttgagctcgcaaaccaaaatctaattaaatccaaataactccaattagaataaacacacaataaaaattaacatcatcattaattaatttaataaaagtaattaagcttgttttaggaacaaaagcgaaaggcgatatttatttaaattttggaaataggtaaattttaaaattaataaaaattgggatgtgacaacgacgcggtgatcttcttccacccctccagacacgatgcgctgacaatcaattttgtgctcaagctg

SEQ ID NO: 799 - DNA, 1999 bp, Oryza sativa
  misc_feature (550)..(550): n = any nucleotide
  misc_feature (551)..(551): m = adenine or cytosine
atctcgtttaatgcccaagtttgaccccaattactcataccaaactctagaattgggtcatagttaagcagcatgtattaggtacgatccatgagcgaattatcaaaccacatttgctaatgtcccctggacatagccatcaagagataatcaatacctctgacaatggtaatattcataataaaaccattatattcagacatatccacaaaaatagtggaatgtgtcggtgcaaccgtcgttggcataacgagctcaacgcatgcaacacgacgaacctttgcatcgcttgcacatgtccacaagcgaaaaacgccagtgtgcgacaagcatggtcatcaacccgtggatgatcaaccaacacaactagggagtagtcatcgactacgagagcgcgataaaacgcaatagtgcatagccaacatttgtctgaaatacagttacatcggactgtgtgagtggttgtaactcctcggattatacactaattgttcttctaaactaaagcattttatcaattccagcatgaagataagctttagaatagaanmtgaaagaccaagaacgttatttatctgagaaatatcgatctaatgcaaagttccaaactaagcaaaagataaactgcttggcaatagtatagcggccaatgtcctcctaggacatgctcaaaactagcaatacaactcccgttgtcagaacaacttattagacagacaccaccaaccatcgacatcaaccaaaggtggtcattagcgctagatccacgcgaggacaagactgggtcaacacccaagtttagctgttgacgctatagtggagtgggaatcacgcctattcacagcatctaccctcgggcttattccgctagatttgcctccaattttccggtgtcctcgcaagacaataggttccaaataatattgagaagatatgtgcacaccaggggcaaccatatgaacagtgtcgttccaccacatggaaaacactttacatctttcaccggaccgagtgaaaaatatctcaaattattgaacctcgcaactccacgttgccagaaattgaggtataatcatttatctccaaatcagaaaagcatgctctcaaccattgggaaagcaaaatgtcgaccgtagtccgaccatactctgattgagatgttaagccactagaggaaaggcacaatgaatcccaaacacattgtctaattccacatatttcaacgactcaaaatcccattcttgagtgtgatcatagggatagagtgatctacattaatgcccaaagccagacaatagtcattgagggcctttacgtgaaatcacccacactatcatccgaatcgtttcatgcggttcttagagaacgcaacacgcaaacggacgatttgcacagtgaattcggcaaaagcatggatctcgtacaacaagtatacgtgactccatcttgtagacacatcgatatcaccatttatgtatggaggagtgtatcagtaaagagtggtcttatccatagccatggatatttaatttcccagaatttccatgcattaggtgattttctattatttacttggtcttatttggcattatattcccaatatttatgccacacagaaaaccatcacacataaatgcaggaaaataaacccatcataatgcttccaatgggggattctacactatgtgaacacaatttatggaagcatcataacctagagaaccatctctagattatttagttggaattgcatcaattttaaaagcaaagcaatgcttaaaaaacaccattacatggttatttacgagtccgaagacccacatgcaaaaccaaactatacagggcctaagcaacaagacatttaaacagtgaactatagcataaaaacccaacactccgggggcttaaacgcaagttgtcaataaactgaaattaatcaggccgaattaccgttcaggccacgatcttatttgggctagcaagcacagtgtagcccaaa

SEQ ID NO: 800 - DNA, 2000 bp, Oryza sativa
  misc_feature (33)..(34): n = any nucleotide
  misc_feature (36)..(36): n = any nucleotide
  misc_feature (43)..(46): n = any nucleotide
  misc_feature (48)..(48): n = any nucleotide
  misc_feature (50)..(51): n = any nucleotide
  misc_feature (53)..(53): n = any nucleotide
  misc_feature (64)..(67): n = any nucleotide
  misc_feature (70)..(72): n = any nucleotide
  misc_feature (74)..(76): n = any nucleotide
  misc_feature (79)..(79): n = any nucleotide
  misc_feature (81)..(81): n = any nucleotide
  misc_feature (94)..(94): n = any nucleotide
  misc_feature (273)..(273): n = any nucleotide
gcgtcctctaggtatggagaaaaactaaaaaanngnttgcgannnngngnncngaggaggagannnntcnnntnnnggngntctcaaatccagntacagtattatctacagcttgtaaatcatatctgatagtacaaagtaatttaataaatcgtcatccggtcaggcaatgaaccagtcatgcgagttcccgtacatgtgcatcgacgtcgcgtcgtgatatgccgatgcggacgcgggcggcgcattaggcagatcgccacgatgagtccngggcccggggggccccggccggccgtgccgcggctgcacggcactcctgtgttctacccaattgcgacgtcaaatcgacggtgttcacctaaagttgggatccagtttgttcccgggttattccttattcccgtctgatgttggctgtgtcgccaatgtggctgtcactcgcggccgctccacactataatagtgtactgtgctagtgtggtctgaagtctgcagctgtggacatgggcacaacgcaactgggtgatctgattgcgataaattatatttcaggttagagaagagaaccgacggaactcgcacgattcgtcctctgcttggagtcatgttccagcccagaagaatgggtttgacgctttacggcagtgataggccttatcatgttgagaaaaggtggtacagctagccgacatgtgcagctgcgatctacaggggaactttgctcgcgtcctaacagtggcgcatatcgtattaccctttgagaattcgatgataaggtttggttggatagatcgacgctgccaaagcgccaatgctggactgacgcttgtaaatgcgccagcagccagcttaatttgttgtgtactaggaagccatcgatgacaaatatcgcctagaaaccgcacgcatgttcgcctgtccatccaccggtggcttccttcctatcgctgcccaagtgtgtagtgagtgccccggcaaggcgatcagtggatatgtggcaagataagggaaaacagaaccgtcctttttcacggacgtgtgttgttgtggggctgtggcccatggacgcgctcgacggagctgttataatgcatcgacaagtgcggtgatccgtgatcggaatcggcccctatcattgctctcaaccaagccatgcggcgcaatagtgctacaaatagttaaccaacaaactctgccgactgatgactgatcgatcgccagatccaccgcttggaccatgcttgcatgcaccgcgagttctgttgatgccgatgatgattgatccgacaatggcgccctgctgcttcagacaaatcaaccgagaatcacgagcggttaaactatacgctgcggtgccattggccgaacgtacgtaggggctgtttggttcgctcccaaaggttgccacgctaaatcttaggcataccacaatttcttagtatagtatttggttagttgtcacaattatgtgataccttactttgctagtcattggatctacacgtcatagacttaaatttttgccaaacttagtcacacttgtggctaactaattgctagcctcactttgtgtggcatgatacatttgtgacaaagtgaggtgtggtaaacttagccatcaaccaaacaaccccgtacagcctgtgcttgcagtgcccggccgcgggccgcggataggcatagctgtagtagatcgatcgacgaggaagacaactgcagtgcgatggacacgttacggcggggcgtgtcgactagcgtgacggcctgacgggacgaggattagcattagcagtggcttgtatggtacagcgaacgcggcgtgaagaggggggcagagtacaggggacggaaggcgacggggaataaagggcggcggcgaccgggacgggacgggaggggtcgcatgcccacgcatggcgcgaggcgtggccactggcgtctgctgatctccacccgcccgtgtgcggtgaagtactcctacttgagtacgtgacggg

SEQ ID NO: 801 - DNA, 1999 bp, Oryza sativa
  misc_feature (53)..(55): n = any nucleotide
cggcttcttcgctttctccgcctcctcgtcccgctcgggcgacgtgggcactnnngtgtcgtcgcgcgtgctggcaaacgcgtcggcccttatcagcggcgccgacgacgcgtacgcacggtgggacgcggtggtggggtgctgggcgctcgcggagaagtaccggtcgtggtcgcccaactcggcggcgctgcagcacgtacgtggttggttggttggttggttggcttcttctcggtttgttcgttccttgtggttgagagtgagtggggtggaggagagacaggaggaggaagatgaggggattcattcacgtggcttccggagagagcataagtcaacgtgcggcttgactctggagatctctctctctctctctctctctctctctctctctctctctctcaagcgccaaatcagaagtgagtgagtgagtgagtgattcctcctccgtgttcctgtccggcatttatgattttctcgcctacgttcttgtcgccgtgatgtgcacgcgccaccgatgaaggcgtcgaggtcaggagagggagaggattcgacggagagagagagaggcggtggcaggaaaaggttggagaaggggaggcagtggagaagtcaagaaacaagaacccagtcaccgttgagattgggttcgttttccaccctcctctgcgccgatgcgtgtttctttgtgttcttctctgtattgttcgtttcttttttgtgtggatggaatcatggaaatgggataaagatttgcatctttaccatctgcattcgtggggctccaggttgcatggtatcaggatatatagcatctggctagcgtcgattttctttttcttttgtgtgtctcgaaatggtaggaatcgtagtactgatcatttctcccttcgtcggcaagaataattcctttctttatcttggcgcaagaatctaatttgcagtagaagaacaggcatggtttgagtagtaatatcctgtattatgaatctggctgcaaacgccttatctctgcagcaatgccatcatcagccatggccgtcgacaccactgttcctgagtattggctcaactgaaagttcattctctgcgcggtctgggtctactcctgcatggtcctggcatgcttcttgatctggaagtacgaggggccgagctcacaggacggcaatggcgatggcggcggagacagtgaggatgcgcggctgccccgggccgcattcggggtcgtgtaccttgaagattgctggaagccatgccttgagcagatccacccctggcggccatctccatgtgcgacaccgctccagctcgcccctcgcccgccgcctccgccggcggccgtcgcggcgccgccctcccgcctcgccccggctagcttgcagagaagtgtgagaaagagagagatgaggaagggagagaagaggggaaagagagagggtgacgtggacacctgacatgtgggactcacgctgactcagccgccacgtatatcaaaactagggtcaaaaccacggaagaacctcggttaaccggttctttatagttaggatgtcgcatattttgttttacggttcgaggacgttttttatcccgatgacgagttgagggaccatcggtgtactttttcctaaaatcaatcaacaagtgcgcgtctctgtcgctgcacttgagcaaaagctcaataaatacgggccgatctcgttcggaataagttcactttgactcctttaactagtggtcgatacgtatccctaaaccacaataccacatatgtcgatacctcaactattaaaaccggtgtaatttgactccctcagtgattttggagggcagtttcgttgatgtggcgcctacgtggcgatgttgacctggtctttgttccatgtggcgttgacgtggtagttaagtggcattagaattaaaaaatatatatgagactcatctgtcattaaaaaaatatatatcatgggacccactaacatgtgaggcccac

SEQ ID NO: 802 - DNA, 1707 bp, Oryza sativa
  misc_feature (8)..(10): n = any nucleotide
  misc_feature (12)..(12): n = any nucleotide
  misc_feature (14)..(14): n = any nucleotide
  misc_feature (19)..(19): r = adenine or guanine
  misc_feature (20)..(20): n = any nucleotide
  misc_feature (30)..(30): w = adenine or thymine
  misc_feature (31)..(31): n = any nucleotide
  misc_feature (36)..(36): n = any nucleotide
  misc_feature (46)..(46): r = adenine or guanine
  misc_feature (47)..(47): n = any nucleotide
  misc_feature (72)..(72): n = any nucleotide
  misc_feature (74)..(74): y = cytosine or thymine
  misc_feature (75)..(75): n = any nucleotide
  misc_feature (77)..(78): n = any nucleotide
  misc_feature (82)..(82): n = any nucleotide
  misc_feature (162)..(162): n = any nucleotide
  misc_feature (165)..(165): n = any nucleotide
  misc_feature (174)..(175): n = any nucleotide
tggttttnnncncntaggrnctctaaatcwnatggnaatacgggtrngcttactacttttcgtagttagttncyntnnagtnctatgcacggttaagaaaactgataagattgaaaaccaatcgttttgtctagttttcgctccgatggcctcccagtcatngtnggagggggnnttcggatgctagagataggtttatgtttagtcgggtctctcctgttctcggattcatcccattctttgtatagcttaagagagtcgttggcgctcaactcttcttttctcagcttgacggacatggtggacctcattagcgttcttgctaacattgtcttcttgtccgatgaatactgtcttcacctccaacgcgttcagttgggagttttgtcgttttgcatttggttgaggccttgtcctgtagttgcgccggctgtttgctccatctccggcgagtcatcgatccgcatttacagtggccgtctgctttgtctccgacggagaggttcttggctctacccattgcagctaaccaagattaataaaacatgaattaaaaaaaaagctgattttcgagttattgaattttatcggttttcgcctggctttcagtaaaccggtggccgattgtagcgcggttttcaattataaaattggaagataaaccctggatgaaatggctcaattttttttgttaccatgaagagttcgcaactgatcttgtctctccagtaaaagaagaggtaggaaggttgaggagaggaagtgcacaacaggcaggcagttagctgtcgctcgcccatcctccactcggatccccaccccacgtaggagtaggactactactcctgccgctgccagtccaccatactaattccgtttcgtccttgcttcttgtccccattcgacaatccttaggagtactaactgccactcatcacttgaaaagaaaaaccaacaccaaacaaaaatccacatccacccaagactaccacacacaagtttggcgagaattcaaagatgcatctcacagacaacacaagagctagcaattctcttcactgatgcattctgaattttcactgatcagctctcttttttctttttcctcttataagtatatacaaaaagaactttgaactagctagctaagctaagctagtgggtggtgccacggtggtggtgctgattgtggcacagcagcacacactctgcttattttggtttggtattagttcctccagacaggcagacacagctccttgttgttgcttcatctcctctctctctggagaactctactagtgacaacttcaacttggattggaggagtaaaaattgaagagaaaaaaaaattaaaactagacaaggaattattggggaagaagaagactatagcagaatagaaaaggaggatccaaacgttgatggtcgtcgtctcttcacttgccgcgccggcgcctctgcttcttgctctgctttcttgcttgcagtgcatcaatctgagcttgattactcgatcattccgtatgctgctgcggctggttgattactcgatcttggccatgcccatgatgcggctggcggcgcgcacgccgttgtcgggcgacgaccgaggatccacggcggcggagccggacatgtaattccggacctcgatccggatcatctcctgcatcatggccaagaactccgcgctgaacggcgccg

SEQ ID NO: 803 - DNA, 1999 bp, Oryza sativa
  misc_feature (114)..(114): n = any nucleotide
  misc_feature (277)..(277): n = any nucleotide
  misc_feature (309)..(309): n = any nucleotide
  misc_feature (1032)..(1032): n = any nucleotide
  misc_feature (1045)..(1045): n = any nucleotide
  misc_feature (1047)..(1047): n = any nucleotide
gaaggagcactgtagcacgggggagataaacagactttcggccgggctgagaggaatggagggaggctttggggcccaaagggaggagggggagaaagagaggggggggggaanagaggactttgggctgggcttggcccaaaggaggaagaggatttatttttaggttttctttttaataaactttgataattgtttttgttgcttaataattatttccggtgctctgaaaattcaagtaaaatttgagggctccttttagaccaaggagaatttnacaaaaattctccgggccacattcgaattttnctggtacgtattttagtgtttgtcaatttcttttcgaattttaattaattctattattccttttagggaatgatttttaattcgggatgaatttatcaggacgtgacagtttcatatttaatttgttaacttagtagagagtgaggggaagttcaggaaggagtgccctgaaatatcggagttccttcgagaattttacggaggagtgctggaatgtcggcattctaccaacggaggctacggaggcgacagtgtaggcgcggcaaccaggaaggtgcagaaagagagggaaatatcctggaatctgatacaatgtagaaggaattagaggaacaccacacacccaatgttgtgggatgaccatgtattgttatagtatagctaaggtacaagatcctcaaatggaggagaatacaaggaatacaatgatacaatatgatctatacatatatggttatacattcctggtatgcattgcgacaaacagaggaatagtgcatctctctctggtgtttttttgtttttaacgatgatgtgggtgtgggtgagttgggctttttgcaggagtttagctgggctgttggcaaggtcttagaattgggccagtactgagaaagctgttaaaaaattgaaagcgtgtttttgaggtagaagtgaatccgacattttttatttgatgcttacgtggaagactgtggtgcaagatagaaaatatttaatgcnaattagtaggctncnattgtatagtaatagaggattacaaataaaactcttgcgccacaattacacagcaagattatcagcattttggcttatccaaatagtccttactggaaacaaatataacatataacaaagacaaattaaagtaggaaaggggaaaatgcaatagttttatatttcttttgtcttataacaaggtttatcatatgacacaaacatttgaattatagcacactactttattaactatgttgttacacaacacgacatagataatcccctactatgcttaacttacagcggactatccgtttcccgagccttccagaaggctctttctggcatgcaggcaaaatccatctgttaggatgtatccatccattggtaaggatgagctggaagagtcatcaaagcatggcacggagggttagatcaccaggggcgggttgatgcaaaaaattagtattccgccattagatcaatgtacaagtgtctagatatgcagtggtataagaggaaagatgcaaagaaggctaacaaaacacatgcgacaaacccgcaaggaaacaattagagacaactaacctttatactttttttcatcaattaaagtgcatctagttggcacccacaatatcttcactaccttgtagttctatataaaccggttttcctggttcccattctctcatcaatcatcctatagttgctcccctatttcagcatctcaatttaagaaaggtcactcatctctattagtatgataaagttattctaattcctaagtagatgcattattagttattctattttagtgtacatattgctattatctaagtttgcaagatgagaaaatctagtttctattcaatttagatatttttgtggcgtgtaataacatgttgattcgatgaagtacttaacaatgttctgttcttgccatacttcaaaatataggtgtgaaggc

SEQ ID NO: 804 - DNA, 1999 bp, Oryza sativa; identical to SEQ ID NO: 701
  misc_feature (5)..(5): n = any nucleotide
  misc_feature (24)..(24): n = any nucleotide
  misc_feature (127)..(127): n = any nucleotide

SEQ ID NO: 805 - DNA, 2000 bp, Oryza sativa
  misc_feature (322)..(322): n = any nucleotide
  misc_feature (332)..(332): k = guanine or thymine
  misc_feature (333)..(333): n = any nucleotide
  misc_feature (336)..(336): n = any nucleotide
  misc_feature (1865)..(1865): m = adenine or cytosine
  misc_feature (1875)..(1875): n = any nucleotide
ttttttgtaaaagaattctatacaaaagttgttttaaaaaatcatattaatccatttttcaaaaaaatagttaatacttaattaatcatgcgataatacgtgcttcgttttgcatgccggggaggagggggtcacaaacccctcttcccgaacgcaccaaaggtctatctatataacaccaaaaaaaacaaagcgcatatgttatccgcacctgtggcatgtggtcttctcgagtctcaactcaatccattctctccatccactagttgtcttgtgctgcttcgctcgatcatagacctgaatatttagacttgttttgctntgtgttggtknatngtatagaagtatcgtgctaatgacacatttactaatttgtatgttggtttgatacttatattgcgtgcgaacaattgtaaactcgaattaatgttggtttgaatatgttggctcgtaagcttaacgagctagcaaacaagtcaagccaagccaattcattatcctaacgagctagagcgagtcgagccaagccaagccaagctagcttgatatttaaccttatctggaacgttgcaatctctatctattcaatagaaacaaaaactagaggtatgggttgcgttgattggtatcatgttacgtgatctatagagagaaaaactacaagcatgtccagttcattgagaaattaaacctccctatttgttggtaaaggaaaaaaaaggcaattgataaagttggcaatgccatttttattttttcttttgcaaaagtttggtaattgttggcaatgctacttttctctttgcagtttgcagcgtcaagatgtaaagagcctatttcgttggacaccttacttaaaaattggtggatttttttttgtgtaaatgttttagggattaccaaattttagtaaagataaataaggttgcgatattaagttggttaccacctccgtcttaaaatacagctatttctagcacaatactttgtccgaaaatgaaggtatttcttcacctactccctcggtctcaaaataagctaatctcgtattaggatgtgacacatccttgtacgaggttaatttattttgggacggagggagtaccctcttctatcaactaatcacaaccattctctatttaatttcttcgcttactttctcttctcaaccaatcacaatcttcctcaaatcagtttttacctaatttttttatacccgttcctatcaaaaaaatgtgtacatttcggtacggagaaagtattaaaatttagggcttacttgaattgaggttattctttttcctaccacaattttacttcaatattttcaaatgaatgtttggttgctaccaactttcactcgtactatcaaatctagtgctaaaacttgccaattttttttaataatattaaaatgttggtaaggcaacaataggctccgaaccaagcaactgaacatgaaaaaaaaaattgttcaagtcaactactctctctgtcccacaatataaggaattttgagtttttgcttgtaacgtttgatcactcgtcttattcaatttttttttacaaatataaaaaaggaaaagttgtgcttagtcataaataaaataaataataatttcaaaattttttaaataagacgagtggtcaaacgttgaaagcaacaacttaaaatattaaaatattatgagatggagagtgtagtgatgtagcagtagtcaatcaaccgaacctggcgagtggcaaccctctctgtcctacatttcctgatttccccttgccgtcgccagcgtaggcccgtcctctcctcccgaagccaccaccggcccaccgtccatccacgccgccgcaccacgtgcccccamgcccccgacncgcaaatcaccgcgtgatccgatccccccttcttcccaaagtccaagcctcactctctccctctccatcccacgcctcgctcactagcgcacagatctcctaccaccaccaccaccgccgcagcc

SEQ ID NO: 806 - DNA, 2000 bp, Oryza sativa
  misc_feature (220)..(220): n = any nucleotide
  misc_feature (231)..(231): m = adenine or cytosine
  misc_feature (356)..(356): n = any nucleotide
  misc_feature (367)..(367): r = adenine or guanine
  misc_feature (1053)..(1053): n = any nucleotide
  misc_feature (1064)..(1064): m = adenine or cytosine
  misc_feature (1454)..(1454): n = any nucleotide
  misc_feature (1459)..(1460): n = any nucleotide
  misc_feature (1524)..(1524): n = any nucleotide
  misc_feature (1526)..(1526): n = any nucleotide
  misc_feature (1528)..(1528): n = any nucleotide
  misc_feature (1556)..(1556): n = any nucleotide
  misc_feature (1565)..(1565): n = any nucleotide
  misc_feature (1568)..(1568): n = any nucleotide
  misc_feature (1571)..(1571): n = any nucleotide
  misc_feature (1576)..(1576): r = adenine or guanine
  misc_feature (1579)..(1579): k = guanine or thymine
  misc_feature (1614)..(1614): n = any nucleotide
  misc_feature (1624)..(1624): n = any nucleotide
  misc_feature (1626)..(1626): n = any nucleotide
  misc_feature (1652)..(1652): n = any nucleotide
  misc_feature (1662)..(1662): n = any nucleotide
  misc_feature (1686)..(1686): n = any nucleotide
  misc_feature (1692)..(1692): n = any nucleotide
tttattgaaattagttcttcctctttctcagtagagtctattgtcttttggatggcaacatatggtatttcgagaatcggataatcaggttgcctatcttggattatttgcgttggagcaaggcaagttattattcctccctttgagcataattatcctatattctacattctattctatgcattagccatttatgattttgaatgcataatctgaacanatagcaaaccmagttatatgctaggcttttgcttagccctgcctagttagacctgcataaaatataatgaactttagattgggacaggtacgtaagatttgggttgattttgcgggttggctagtacctgtctcantccgatataargtttaaccaagtgcttatgtcaaacgaacgagtacgaccgcagcttctagaatggggacagacctagatattatgttaattaacaatgtggtacctctgtacagtggttcttatgtaagtcctcgcgaaggaggcaaatatatgctgagcagggcaaatgtgatatttaccgaggcgcacataaatatcttgattatcgcgcgatgtttgtgtgattttatggaaacctggttgagatgacgtggggtctctcctccagttctctctaaaaacctcgggaactccagaactcctctcgctgctgataacgttacgttcagagcgcatggggactagagttcatggaacaggtgccacaattgttaataacttaatactgggccatgactaagctaatgattattagcaagttatggactgcgggtaaagcgtacatctactgcagtatgaatatgtttaaaactattcgaatagccgtgctcacggatttgagcatcgggactgatatggtactttggttagaaatataattcaagattttcttaaatactgctgcatatcaagcatttcaggatttctacctctttattctcagcattctgcaagtaaatctagctctacacagatattacctctcatgcattcattgttgaataatataatagcttgctgagtacgttgtactnaaccttgcttmaacccctctttttcagagtctatttggagtttttgccgaagctgggagttcaatcatataagttagtttcattctaacttaattttcaagtatagactagatacatggtttaagtctatagcaaaacattagagttaagccattctatagcttctgctgtaatagttagccacaaacttgtaaatatcctattattttatataaagatatctcctttggagtctttaccaaatgtatgcgatgaagatccagattgttgaacctgtatcaatctactgatccaaggcttgatacaattaaacatctcggtttctgaatcgttagttttgggatctgacagcggcggaggtgcggccgaggaccggcgggacctagggagtacagaggagngattnngagagggagaaggcttcgcggcacggcgaggaacaccggccgagcacggcgtttgcggcgggantnancgaggagtgaggggaaggcgattacggnagctcccgnagnttnaggargtkgtggcccgagggtctcttcatccttgcggagccgnaggaggcgangntgcaccgcgaggaggtcgggaacggnggggatcagngaccggaggtggcaaacggcggcngtctcnggttgatggcgaaagtggtgcttcggaggtggactgggcaaactaagtggcagccggccttgcgcttgcgactgcgaagccaatggcgcaagcgatgagccgcagcgacgtttgaagcgtcggtggcgcgcggctggactcggtggcagcggtggaaagaggtggtgcgcgtggcggcggcgttacggaggcgaagaggggaaatagagtaggggccagggtagagcttggcacagcgatgccgacgacacaaacggcgcggcacggcggcccctaggatggtagtagcgggcggctggtggcggtga

SEQ ID NO: 807 - DNA, 1999 bp, Oryza sativa
tcgtatccaacttcgtcacccggtatccttgaccgtctggacctcaactcctccctgagtttagtcccgatccccaccgttgaccaaagttgacatccaagaattctgactctagtcaccttctcacatggtatcccgactgcactagacctctttttctccctgaacatagtcctgatcctcaccattgaccaaggctaacctcaagtcacctgcacacaatcagacaaaacaaccgtttatgggcacagatattacaacctgacccacattagtcacacgcactcataccaacatccacacatcttttcaaaccaattcatcaattaaatcatttgtaacgccaattgttcatcacaaatattaatcatgacaatgatttcacaatggtaatatcacgaccgtagattataatacgtattaaacatgggtttcttttagaacgaatcaaacatgttccagaagcccatctaatacgcaagttataggtggtattattttcatggaaaaagtacgaattacctcctgaactatcgtggtcgattgaattactacttgttaataacgggatttggtattagattcggaaaagaaggaagaaaattgaagcggatttggtgttaaatcgaattgaatttggagtcggactgcacatcggctgaatatcgtatcggatgaaaacagagtatgaagttggtaaaagttgatgaagccgatggccgatacagccgatataacgtgacttaggcttagcatgggtctagattggtataattgtcattgccaaatagagatatagctcgattaaggcaattgtatctatgaattaggatgttgagtcggtttattagtgatttggtaagagaccgtcatatatggtcttgtttgtatcttaattttacaaaggtttgagctgcatctataatggactaactttgtactcggggtataaatatgagccccatagcattataataaggaagcaaatccaatacaacttcggcgcatcactacccttttacttttctcctttttcggtgagttcttcgcaagaggtaacccgtctcaatggcctgcgctatcagggctaacatgtcgctttagacgtgttaggctcgatatcgcgagtcgttgctatcatatgtcttagttaatttattcttagcttctcaattgagctctatcggctgttactcgcttcagggtttatgttggttttggttaaactgtcttgctagattagattagctaaggcatctaccattgtaaaaagtgtctaattgcttgattgtctagactgcatgtttattttcatactttgagatgcatcatccctagtcgtgcttagaaccatacaaactagctggcaattaggcataataagaatagtatcggggtttcagccgatcttacctaacatgcatgtttcatcccctatttcatgtatattcgctacttacatagatagattgttttatatgaacatatcaagctttagtcagtattggctagattccaaaactttcatgcttgatttatgtttgatatgtttatatgaatcaatctatttatataagtttgtactagagtattaactagtatgttatctttcttgcgccaaatactgtcacatcggctactttcgtaatattgtcttaaatcaatctgttaaactctatagatagtattatagccgattgggcatgtttagggtttattattctttgacatatccagtccatagccgatttggtctaacttcatctgtttagaccatcaacgatatgctatcggcctatcggccgatcggctatcggtcgactgattctgcttttattctttcttgctgattgcagaatcaaatcaactagcatgcccttgacacacttgaggctagccttggacctacactggagttaagcagatctcccatggcgtcgtgttttcacatcaacacgcttttggcacgcctagtgggacaaagtttcgttattcaacc

SEQ ID NO: 808 - DNA, 2000 bp, Oryza sativa
gctggcaaaggtaaagaccatgttaatcggtgccgtcacaacactcttcccttttgtcaacctctttgcctcatcggctgcaacatcatcggctacaggaacctgactcttaacacgccactcctgtcttggctttgctttcttcagccgatgattaatttcttgttcaacctcctgaaggcgctccctattcctcaatctttgaacccttctcttttgattcttcatgaaaataccagaaggacaccattgattcttcctgattacattgtcctcctggccatgaccttggttcactggacccaatctttgatgaacagaaactcttgtctgccttagccgattacccctattatatgaccggcttgagctcccgacgatatcactgcacccagggcagttttcaatagatggcaacctcataccatcattccagcagaacctaaagaactcacaaccccaatgagggtcaaaaccatcatcgtattcttcataatgcttctcctgctccttgtcatacttcctctgatatttgttgataatcttagctgaattcacctgagaaccctttgcacggaccctatcggctgtttggccagctgtatgcaccatattaacaggaaaaggattaccatcaaccttcatcggctttttggaatcatcaaacctaatcttgcccccctcaatggccacctgaatctgctgtctaaaaaccttgcaatcgttagtagaatgagacccagaattatgccattcgcaatacctcttttttcctaattcctcagccgatgcgattgtatgaccagcaggaagttgaatttgcttctctcggaattgcagatcaaagatcttatcagctttactaatatcaaagtcatacttctccacttttccagaactttttacacattggcatggtatgacctttttactcctcacccattcggctgcagctatttcagaatcgtcctcgtcatcatccgacccatacatgtatggacaaacatgattaaccttcttagagcttttcctaacttccgcagacctatgttcatgcaaggttaccttctgtatcagatgtgacaagctatcaaagtcttcagacgagaatttctccctgatcggagtaatcataccctgaaaggccagatcggctaactcggcatcagttaaactcaagctgaagcatttgttcctcatctccctgaatctctgaatatactcgtgcacaggttcatcatgccgctgcttaatcgctgtcaagtcagataatttcatctcatgaaccccaccgtagaaatagctgtggaattgcttctccaaatcggcccaactattgattgaccaatacggcaaagaggaaaaccaagtaaaagccgatccagataaagacaacctgaataacctaaccttcagaacgtctacagtcgatgcttcaccacactgagccaagaatcggctaatgtgctcataagtcgacacaccatcttgtcccgaaaatttggagaagtccggaactttgaaccgattgggaagaggaactctctcaacaaactcagggtaaggctgccgatacaagcttccagtctcttttggtttgagcccaaactattccctcattacatcagcaatcacatcggcccacggtcgttgttgagttgccccttgcgactgttgcttcatgggctcgaactgaccgtatgcaaactgaggttgagccaatccccctaactaatattgggcttgtggggaaggaggctgatattggtaactcaagttacccccttggtaattgtgaaggttcggctggatattgcgcatcaagtgctcaggaacaacttgaggcattactgtgccattcggctatacatggtgaaccaaatgttctgggacaacttgatttaaaaattgttgtacaggctgaccaccaggcgttgcaaacccggccgatgcacttattgacccctggtgctgaatcggctgaacgatttgctatctta

SEQ ID NO: 809 - DNA, 2000 bp, Oryza sativa
gcaagggtcagcgaaggtgaggccttgtttcctctaactcaattatgtgaacaacacagtttttatgtctataagacggtagaggtaggcattaaattatattgcacccatatcaaaccaatgtgaaaggggtggggtcagcaaaggtgagggtaaggccttggttccctaactcaattacgtgaacactgcattttaactcaattatgtgaacattgcatttttatgtccattttatgtgaacggtgcatttttatgcctataagatggtagagacattttttggaggcattaaattataccacaatcataccaaaccaatgtgaaaaatataataaaatattttccttttctattaccaatccttgaactcaagaccattggcaaatcattttatgttcaatacgctaaccaactcaatcccatatcattacttatatgtttgtgcattgtgttacttatatttagtcccttagtgtacattatcattctaagaagtgtctctaaagagtttaaaatgtctcaagaaaatacctttacatattagacacatttcaaagtactaaaaaaatgcctctacaaaatgtctctaaaaaaatgtgctgaaaaaatgtctctaaagtgcctctagagtgaaatatttttagacatttttcatgtgcctctaaaaagtgtctctacactataaaactcatggttttagaggcaattagcaaaacgcctctataaaagtgcctctacatgagatttttgttctagtgccatatcaaagtaaagcaagtccggtgataatcacttcaactatgaactagataaagtatgtaggtaccgacatagaaatgacaatgaaagcttaaaggtaagaaacatcaaacaaaagataattatgcatgtagcagttcacttgcaaaataggcagctagcgttgccacccgcaacaaaacaaatggtgcgagaccgacaaaacgcaaatcaccagcagcctcggttgctaccagcaacggttagtcttatcgtcagttccaagaggcgcttgtcgtggacagatgtaagtacacgcaagcaagagataagaacatcaaaacgagagtaatgtgagagtgccaactttcctaacataaaaacaaatgctctagggtatagctcttctcgatgaaaaatcaatatgtgtaccaaattactgatatatacatcgtacattatctagtaaatttatgttgttccatcgtgcaaataatagtatgggagttttatggtaagacggataatcacatacgaatgacgagtaaaacctaaaagtaaggaacgcctgacaaaaggtaattatacatagcacccacctacaaaacaagcaactaaccttgccgcccaccaacataacagatggcgcaagatagacaaaaatacaaagcacaagcagcctcagacgctagcagcaatgttattgtcagttccaaaaggtgcctgacttggaaagatttaagtacacgcaagcaagcgataaacacatcaatacgagagaaatgtgagagcgccaactttcctaacagaaaaccaaatgctatatggtatagctcttctcgatgaaaaatcaatatacatatcaaattaccaatatatacatcgtacattctctaatagccttgtgtcgttccattgtgcatataatagtacgagagtttttatggtaatacggagatactcttgaaaaagttgaaagcatggagaggataaaaatggctaaaacatacttggtgcattgagattgaaaacaaccgaagagaaattattttttttagaaaaaaagtgaaatatagcactaccctgcctaccctaccatggggttcgaatgcgagtttgggttgggctaaaacctcgcttactgcgagcatgctctccaaattgttaaataacacatcgcatgtaatatatatatatactgaatgtagcaatccacccacaaaacatgcaactaaccttgccgcccgctaacataacag

SEQ ID NO: 810 - DNA, 2000 bp, Oryza sativa
  misc_feature (1616)..(1616): n = any nucleotide
  misc_feature (1789)..(1789): r = adenine or guanine
  misc_feature (1792)..(1792): n = any nucleotide
ttagtttccttttatctttaggaaagtgtgtttagtgtccaataaggactttatgttttccttttatctttaggttagtttctttcttgtccgacaaggacttgtatcaacccacgggtataaatatgtacacccggggcctatgtaatctatcctcacgatcaatacaattcgtcgcattgccaccccttttaccttttctactttattttattgtccggcgggacttggcacctgacgcggggctgcatcgatgttcgatctccagcgaaggggtaagtccaatgttccgtcggcccaagcaattgtctcatctatatcggcgtcgttcaaggctgcatcagtacattcgacctcttggattgctctggtttcgatgatatatttgcctacctatttatcatatgtctctgttaatctagtcttagcatatcaatttagctctatcggttgcttctcgttttagggtttctgccggtatcggctaaatcgtgttgctagattagattagcttagacatctaccactctgaaaacttagtcaacggcttgattgtctagatattatgtttcttttcatacttagtgctgcatcagttgagtttgatctactaagtcgtgtttagaaccataatctctagcctgctttttgactgccaataagggtttcatcggggtttgagccgatgagttatctggacgttgcatcggctcataatgattgtatatacatataagttggatttagccgatgacaacagaggtttcactgtttaatataatcttgtggatttcatgacatcggacctccagccgatatatgctttaaccttcggatcgatgcttatttatcatatcaatgctagccgattggtttatactggactatattattgttatattttattatcagtagccgattgcctatataacattatttactaaagtgttagaatctacattggacatatagccgattgctctaaaccctatcgctatcggctggtatcagcatcggctattattggcgattagctataactactccatcggcttgttagccgatcggctgttttgatctactatttgcatatcttgttagttgcaggatcaaattgactggaacgcccacatctcatcaagatttgtacctgcacaggagctaagcagatctcccaggtcagtgtgcgattttttcgtcaacaaaaaggcatctttgccctaatcttaataaaaaccaattttctaatggtattcgtctaatctgtcagttcaatagcaagtataatgggtttcaaccgtttttgatggagatatgcaattacacattgggcctgttgagattgttgcaattttaagacataacattgttcggtaaaattgacaaatatattattgcattgaaaattttggcaacaacacataatcctaatttaccaaattgacaatattactaacttgattttaacagtaatctgaacaaccctttatttgtgatggcaaatccacgaaaccggttcaaactaatgccaaactaggagtatctaattgggccgattaaaaaagtaggtccacatgtcagctgccggggaggccacgcccagtaaacgggtcccnaccagccgcgagcggggagccacgccacccaaccaatcccaccacttcacgccgtgggacgatctccgccgtcggatcgatcccacggacggccgcaactcccccagcacagagaccaccgcgattggttggggcatccacgtgtcgtgctcggactggtcaggtcagactcrtgncgtcccggccaacgcgacgggggcgcaactagatctcggcccgttcaagtcatctccccttataaatcgcccacgaacccataaaactcaaactcacttgaaggttttcggatcgcaacccaaactcgcacaagggagaagagaagagaagcttcgagagagaggtggaggaggagacgagcgcgtggtggtggtggtgttggcggcg

SEQ ID NO: 811 - DNA, 1999 bp, Oryza sativa
  misc_feature (581)..(581): n = any nucleotide
gaaaaaaaaaatctaaacatggaaataaccagcctttctctgaagcttgcattaaacacctaattcacatggtttgttgagtactagtatactcacccttgctctatataaatacaccccccaggcacaatttctcgatgaagaggagatggatccagctgatgagttcttccaggaacaagcaggcttcgagcggtattagggttttggcttagttccaaagtcatgcttgtggctttgtctagtctccgcttctgcctttttgtaatgcagttgtgaactcgggggttgttcgcagttccaacaatgattgtatccctactcataataacgaaacccatgtcgctgtgatattctatcttcctttgtactagctctatttcctgggactggtacatgctcacaagttaatatgaatctccttacattggttttcatttggagctagtttggggcgtgacacatggtatgctagaagaatatttctttggctaaaatttgcattcaccatacttgtgatatttttttaaaataagttcatcttagatggtcactgtaaatatataaatctagatggaganagttgcgaatatatgtgacatattttcggtgctatggaagatattttattagggaaagattataagtacataacttttcaaacaaaactcttgtgataaaagtgtgtgtggcacactatgaaccagcctagttttactgtaactaatttatactcccatcgttttttaatatacaatgtcattgacttttttacatacgtttgaccgttcgtcatcgaacataaaagatataagtccatgcttaaaaaaattaataaaaaagtcacaacaaaataaataacaattacataattttttaaataatattaattgtcaaacggatattaaaaagtcagcaatcttatatatattaaaaaaacgaatgtagtacttgtgttccttttgatcttaacggttggtttatgggataaatacatttattccattaggttcctacatatgtcccaaaggatatctaatcccttaattaactctgcctactggtggccttatggttccatgttgaatgccccgtgcaccaatgcccatgcctacgagcataaaacgttaaaaaaattaagattgaaatataaatcaaatatatattagaggcatccataagtatgaggaatttttatgtactaccccatctatgaattcagggacaactcagctttcagacaacattaggaatagataattaaacaaaaacatatctaccatcaaatgaaaagaacattcttcagcaaaatataaaatataatcaagtattttactattataatccaaataaattgattcaaaatagttttaaaaaaatcaataggcaagttatatagtcaataaactgtaagaaggcttatgacatggaaaaattacatacaccaatatgctttattgtccggtatattttacaagacaacaaagttataagtatgtcatttaaaaatacaagttacttatcaattgtcaagtaaatgaaaacaaacctacaaatttgttattttgaaggaacacctaaattatcaaatatagcttgccatgcaaaaatgacaacatgcttacaagttattatcatcttaaagttagactcatcttctcaagcataagagctttatggtgcgaaaataaatataatgacaaggcaaagatacatattaagagtatggatagacatttctttaacaaactccatttgtattacaccaaaagcaccagaagtttgtcatggctgagtcatgaaatgtatagttcaatcttgcaaagttgcctttccttttgtacagttttaacactacaagccatatattgtctgtacgtgcaacaaactatatcaccatgtatcccaagatgcttttttattgctatataaactagcttggtctgtctttgaactcacatcaattagcttaagtttccataagcaagtacaaatagct

SEQ ID NO: 812 - DNA, 1999 bp, Oryza sativa
tccatcctctatcctaccattttgagagtaaccattaataatggtattataggtaacgtcactaggttttaccccattgaacaccataactccaagtagtttcattgcttcatccatcttaccatctaagcaatatccatcaatgagtgtattgtatgtattagtattaggttcaatacctatgcgcaccatcaagtcaaacaagtttttggcttctataacccttccttttttgcataggttgcccattattgcattgaagaaaattgtgtcaagacagatgccgcgatcgatcatttcgaaagctagctcctcaaccttgtcccatttgtcacaggtacacaggccatgaattagggtggtaaaaacaacaatgttaggagcaagtccttcagatttgaggctgttgaattgagacaaagcatcatccactctgcctgctgtacaaagtatgtctaatactgttccatagttgactatatcagggttcaatccttgctgcctcatattgctaaatacaagcaaggcctcatctaccttgttatgtttagcatatgcgcccattatcatgttaaagatatgatgaccaagttgcatacctttcttcatcatcaaatccaaaagatcatgcatctcaacaagagctccttcagtagcatagccatgaagcagagtaccataggtagtgctatcaggcttgtgtcccctcttgaccaaagaatcaaaaatctttctagcttctgtgcttttcccattcttgcatagatagtccatcagcgcagtataagtaacgacatcgggttcaacaccatgtctgcacatctttttgaaaatcccaatggcctctttgggctttcctgaagagcaatatccatgcacaagactagtatacatgatgcaatcaggcataacaccgttcttaaccatcctagtaaagacttgtgtggccttgtccattgcttgagtcttggatagggcactgataatcgagctgtaagtcacaacatctggtgatggccctcgatccagcattgcatcaaacagggaataagctttgtccagctgaccctccctaagcaagccattgatgacagtggtatacgccaccacatcgagtgggcagcgccctttatgatcagccatgatatggagcaagtcgagagcttgttgacttgtcttgtcatcacagagacccttgagaagaatggtgtaggagaagagatctggcttgcaacctagctcgggcattcgtcgcagcacaatgtccatcgcatcgctcgtcctcctgcggtcacagaggcccttgagaagaggactgaagaggattgggctcatcctcaaccccgtcgtgatgacacggccgacggtggcgaaagcgaggtccaagcggccgaggcggcggcagcagccaatgacgatgccgtaggtggcgatattgggagccgcactggtggcgccggctctgggcatgcggttgaagagggagatggcgacggcggggctggcacgcgcgacgtcggagagggcgcggttgaggtcgaagatggaggcacggtcgcctcgcttgagcaatctgtcgaacacctggtgtgcgtccccgggctcggtcgctctctgcctccctccttgcttcgtgcgcttggccccaccccgtcctccttgcttcgtgcgcttggagctggaggccccagcccgtcccagcgcgcttccaccgccgcggactcccatggccagcctctccaactccggcgacgccgctcggccgccgccgccgcgtcgtccagagagagaggagagttctgagctggtgggctgagaaactggaatgtggggcccgcacgtcagttcccgaggagatgacccaaatgtgggcctagtgttgggccgcacagatcaccatttccggcccaattaaaggcggcccaagtaaggggagacacatctcagcacaagcaagagggaggctgcggcggcggcggaggcggaggtgagcattgca

SEQ ID NO: 813 - DNA, 839 bp, Oryza sativa
  misc_feature (1)..(20): n = any nucleotide
  misc_feature (77)..(77): n = any nucleotide
  misc_feature (102)..(200): n = any nucleotide
  misc_feature (250)..(250): w = adenine or thymine
nnnnnnnnnnnnnnnnnnnnggtgcgaggcgctgcggctgttcatggacggcgtgggcgagctgcgcgggtgcccgngggaggcgcagagggccgccgccgnnnnnnnnnnnnnnnnnnnnnnnnnnnnnnnnnnnnnnnnnnnnnnnnnnnnnnnnnnnnnnnnnnnnnnnnnnnnnnnnnnnnnnnnnnnnnnnnnnntactgagaagaagtgaagcttgtgatattatattattttcaaaaaaaaawtgtggagattgtgatatgtaagttttcgaataaagtgttgcatcggtggattgatctgatatattcagatcgtctcattcaaatgcattgcgaactgaattaatattaaacgaataattgaattaatattaaacgaataatacagactactcatgataaaaattaaaaaagtgatattaatgtgtccattaatttttgctcgcaaatccctacttttatgatacctcaaatatactctcacaagtcaccagttaatccaaaattcagtttcacaagactccattaaagcaaaattaaggcacataaatccaacttgagtttcagaagtctacgttaagcagaaagcacgtgaaaacaaagcaagctacacgatcacaccaaattctcttccaacaattctcgaagtaatcagtcatcacacgcaccagccatatttcagtttcacaagaatcaattcaagcaaagaaagcaaacaaaatcactgtaaaatcatttctaaaatcactttatatacataactcatccatcttcaatagcaagaactccaatactgcactgcataagttcagaaaactagagcagatcgaga

SEQ ID NO: 814 - DNA, 1999 bp, Oryza sativa
  misc_feature (34)..(34): n = any nucleotide
  misc_feature (37)..(37): n = any nucleotide
  misc_feature (40)..(40): n = any nucleotide
  misc_feature (49)..(49): n = any nucleotide
  misc_feature (66)..(66): n = any nucleotide
  misc_feature (71)..(71): n = any nucleotide
  misc_feature (143)..(232): n = any nucleotide
agccccaacatccctgcagcccctttttatctcnggnttngcataagcncattttcagcatatttntgccnttttttttttttttgaagagaataggcttcgttgctatacagacaaaacaaatagttggatgtcaaaatttnnnnnnnnnnnnnnnnnnnnnnnnnnnnnnnnnnnnnnnnnnnnnnnnnnnnnnnnnnnnnnnnnnnnnnnnnnnnnnnnnnnnnnnnnnaacaaaggatgtcgtcaatttattactgtttcaatgtaaaatgatcgtgaaaaacaacatgtattatttctatttctttttcggaaccaaaatataaaaattaataagcttcatctccaaatctatccaaactaaaagaaaaaatagttatattagataacacaaaatgtagctgtagaacatcagtcatacatataaacaacattaatataagtaattaagtagccatgttttcaatcaaaagtagaccgcttgacaaacctttcaccaatttctggcctagaacagacaaagggatgctgacacgcaccatatggagcttaggacgctataatcaggagttcgtcttgatcaaaggcaaaactcatgaagtgtattcacatcatttgatgctacatcatatcgatttgggggtcaaatctactggaaagccacatggagcaccgctcaaacggaattgcgtcatggtggttagctgctcgaaggactcgtagtcgtacctttagctagttggttgcggttgtgcatgggtgcagtcagctgcggttcatcctcgttgccacccaatcaaccactggagccgcatccacgtcttccatcatgctcgcctggatctcgtggcggcggcagggctactaatggatagagagaacatattagagatggaggaagagagagaaggggtaggaggaggggatctataccttttgaagatggcggcagagggtgcgggcggactggacggcgcgatcggcgttgagggcggcagactggacggccgtggaggaggcgggctacccggcgaacggacagcgagtctcgatatgtggcggcgtgacggcgcccgcacgaacctgccgaaactcctgttcgtgaatggcaaggaggcggggcccaggtggtggtggagggaggcaccggcgggcggcggcggcgaagacgggagcggccacaggagccgatgtgagggaggcaccacccggagtggcggagtgggaaggaggcggcgatgaaggcggaggaaatcagaaaatcgcgtggtgggggttgggaggaaatcacgcgattgattttggtgggaggtgggagtgggaccgagggaatgccgagcgacgttagggtgtggggtattgatgatttgactgtagcatgggagaggaatcaggtgggattgatgagatagcgatggacggatgagattagatcagatatgcagatggacggatgggattaactatgttgatttcatctgtaggattgcaagaagacaactcctcctttttatattagtatagatgtcctttgcatgttggatcatttcacaggtgtgtttttttcattaattaatctaacgcaacagacttggtcgaccaaacattttttttccttttttttaagaactgaccaggcaagatcagtagcagctagatctcaccatacacgtctgcaatgcatccaacgagtgagtcaacacatagtacttttcttactatgagagaatgagtcaacgttacatacatttgaccgacctactcttcagagtctttgaccttctacgcgttctacttctactgcttcagttcacaatttcacacctccaaccaacgcctatatatacacaccttcccagcacatctcatttcattcaatcatccatcgatttctagcttagcttctactgccaattgcttggagattgatcgaccatcatctccatcgatcctcgaagtcgatatatagctaattggaccatattccatggcgatc

SEQ ID NO: 815 - DNA, 2010 bp, Oryza sativa
aacatattcataaataccattacttgattttttttatggaattccttattcatgtagaacatattttctatttgatgaattctccatgcatgatgtttcaatcttcttttttttattgtgtggagtatataaaagtaattagaatttgtagcacctggacatatgcagcaaattattcatctactactatagttcggatttatttttatcgatgcaaattggatttggatagaaatgtacattcttttattttagtcagaataaaagtttcttctatctagaatatactataataacatatctatctaaaacaaatatggtacaacacacttgcaactagcagcaagttccctgaaagatgtttgtctaatgctatggtgatctctttcactacagtttggtgtatgtgtgtccatagtagaatatgagtcctgcaaaagcaaacatcatcatgccaacaaaaatggcccatgtgccatcaataattcaaggtgcccgttgatgagtaacagaacatttgattgtgtcaccctaccacaaacacacatggaaggccattgcattccctataaggacatcatggtcattccaaaatgtactgacacctgctcaatgcagacaaaaaccccttcaaaaaacagaagaatctccctcttaaaaaaactgattaaatgattatttctgaaataaaaatgttgagtttttatttttaaatagtttatatcattctattcttttagaaacgtagtacaaacatagatacttacagcgtgcgcatactcatctatataaatgcacacctctgaaaaactaaagagaagtggaaaaaatggcaagatttactaataattagattatagtttttcacatctaataggaaaattatagattaaataattttttgaaagaaaaaaatatttgaaaacttatttattttcaagtatttgaaattatttaaataaagagtaaattttagaaaactacaactacagtgaaaaaactatcagtttgctataacttttacgtgatatgttgctacagttgtcacctacatgtcctgtagcagtatatcacatcaaagttgtagttttgtgataatttttcatgctattggtgcaaaaaactgaaatagatcattaatattacagcaaactgatagttctatcactgtagttatagttttctgaaatttaagatctaaaagaagaaaaaaagggggggggggggggtgagatttacacacagccacacgacacgaggcagggctaccccactagacaatctgtccactcaccactggcctcacttccttgatctcttctcgtcttctccaccccgcacgcggccacccccgcagggaccccgtgacccgcgcccgcgcccgcgcctcaccgcaatggcgatggcggcagccatgggcgtggcctccccctaccacgccgcccacgccgccgcatccacatcgtgcgactcgctccgcctcctcgtcgcggaaggccggccgcggcggccgcgaggggtggcctcctcctcctcctcctcctcttcggcggggaggcggaggcggccgctcgtcttctccccgcgcgcggtgtccgactccaagagctcgcagacctgcctcgacccggacgccagcacggtacgcgcgccatcgcgaccacgccaccgagggcgatgggataatttaatggcggccgcttctctgcacacctcgctgcttctctgatccgtcgtgtggttgcgttgttttggtggggaatctgactcgcgcggagatggattttttatcttctttttctttttaatagtttagatgcgcaaatgcggttggcgtcttgtccttccattttggacgttttcgtggttccttaattgtttatttccaataaatgtggcaatcgtaggattgttagtggttgaggagtaagattttgtgggtgggagaacataagaaattggtaacaacttgtcatgctctatggtttttgggctcttaaactgttgcgc

SEQ ID NO: 816 - DNA, 1999 bp, Oryza sativa
caagttgttccacgccactaatttttagccaatcaaacccttctctatgaaaagttgaatgggtatgtttggaagacatttgaaatggtagattgtttatgcctaactatattatatataggcagggatattgatccaacaaggccgcattacccaaccatttgtcttcccaaaatctgatttgagatccatccttaattatgaaggacccatatcgaagaaaatcatgtttggccttcataaagctacctagaaatgtgaatccccagctttcaatagggcttgtgataaatgctgaaatccaaatattgcgtatcatttcttgccacgtaccatttgttgtaagcaacttatgaagccatttactaactaaaacattattctttacttccagatcatgaattcctaatcccccttgaatttttggttggcacattatatctcacttagctactcgatacttcttcttgtgaccgtcactctgccaatcaacttttttaatcccgtggcataacattatcaaaatctagaattgttcctttacccttcaacaatttcacttgaagattaaatttagcattaatatttatagagtgataaagtcatactacaataaatccttatatattaattgggggtcatactagaagccccatattaatcctacgagaggtagaaaactagaaattatcgcactagtcaagttgcacttggcctagagtctcaattgtagtataaatgatataataattctaaaattaaaattagcaaataacaagttcaattaggtttgaagccgtaattctatttttataatttaatcattcttaaatttagaattactaaaaaataattattaatacagcgttgtacttgctgtagagactcatatagtttttacgacgatttaataatttcaaaaataaatacaggaaattgctaagtttgtaatctaaaatataatattgtcataatataataattctaaaattcaaattaataaataccaagttgatgttttatttaaaatatatagtatgtgccgcacagcttgatgcttagtctagatcttttaaccgtgctacgctgggttaattagcgatggtgcaggtcacgtacccaaatttcttcactgttggatcaactagagtagttaaacgagggcatgtgatgaaggctagctatttgaaattttccaattatccctgcataagtcaggctacaatagcacctggactacatgcagggattacaaaataggtggtaaccacatttaccgcgttaaccctatcaaattcaaataaattttaaaagtaatttgatttttttaataaattttgtatggtttctcaagctttattttggttaccgtgcttactgccggaggcaatgggaaaccctcactagaagttgcacctgttcttgtctgtgcaccatatcatgttgaatcatgtgcgttgtgtcctttcggaagaaccgatttactacatgactcatcaattccactttacgtatcaaaaggtttgttatgggggcaatgcttttgtgaaattaaatttttattttgcgtcacgttgtatctagttaaacactacctacctaccattacaaaacctcattccacaaaacgatgcatctagataaaaaatatgacatgtaaagtgagtaatgactcatgtttattatcaaaaatcgataacaatcaaatgatataggtagtaaagtacctttgaaatggcatgtccaagtatgtgtagctccacctagcacaatatcccaagtgatcatcataaaaggcatacaaatacaagcagccgatgatgcacacaagaaacaacacaaattgcacaaaaccaaaagcaaccgatgccttgagcatagagatcatgctattcccactataaatacaaatgcaccatatcaagatgctcctcacccttactgaaaaatcacaaacatcaaaacgttataagagttctctagcatccatcacatagcc

SEQ ID NO: 817 - DNA, 2000 bp, Oryza sativa
  misc_feature (506)..(506): n = any nucleotide
  misc_feature (588)..(588): n = any nucleotide
  misc_feature (594)..(594): n = any nucleotide
  misc_feature (601)..(601): n = any nucleotide
  misc_feature (1886)..(1886): n = any nucleotide
gtttgatatttgattacacttggacgtttccaatttgttgcaggattgtattatcatttaccaaagcgagcagctggcattcgttatgtattcattgggaagccaatgattcagaggcccaggtactctcctttattttgctcatctaggagtaccttttatactacggccgagtttagttccaaactttttcttcaaacctccaacttttccatcacatcaaaacttttctacacacacaaacttctaacttttctgtcacattgttccaatttcaaccaaacttccaattttggcgtgaacatgaaacatatcatacaaacattagactatgaaacacctgcaataaatgagtttgagaatgcagatgatgagtcttttcatgatctacagttttttttggacatcttcacatgttttacttccctttgggagcttaaaattctccagcagatcatatttaactcatcggattttgcaggtatcaaatcttgggtatttttttnttaattcagttatgtattctcggtgctgaaaggcttcgaagaagtaatttatcaacaattgctagttcgattaatcaaatcncatctngaagctntccttcatcgagaggtggcactttctttttctgaatttatgaaaccggttttggttttatgccaatgctttgtgtttacttgttacatgggtataaaatgttccaatattacctttgtgaatgggaaacaggtcgaggtgtcacatcgaatatttggacacatgcatggagtattaaatatatataaaaaaattaattacacagaatacatgtaaattgcgagacaaatcttttaagtctaattgctccatgatttaacaatatggtgctatagtaaacatttgctaataacggattaattatgtttaataaattcgtctcgtagtttataggcagaacctgtaatttgttttgttattagtcttcatctcatacttcaaatatttgtccgtatattcaatgtgacatgctaaaacttttcacccctaaactacacagggcctttaggctgtgttcgcgggaggatgttcccaaccagccgttagcgcacggaaaacggaacgatctattagcacgtgattaattaagtattagctaatttttttttaaaaaatggatcaatatgattttttaagcaactttcgtataaaaactttttgcaaaaaacataccgtttagcagtttgaaaaacatgcgcgcggaaaacgagggagatgagttgtgaaacttgggtaagaacacacccttaattaatctcgcgttaatagaccgctccgttttccgtgctaactgttccggttgggaactggaaatagcgaacacaatcttagggtgtgtttagttcacgccaaaattgaaagtttggttgaaattggaacaatgtgatagaaaagttgaaagtttatgtgtgtagaaaaattttgatgtgatgaaaaagttaaaagttcgaaggaaaagtttggaactaagtcctcagtagagttggagtgtggcaaagcaaaagaccgaacctgtttgtcacaggtgccaccaaccctctcatccggcggctgcccaacagagaatccagcatggtttctcggtttctccatccttttcccattttgaatgcaatccacctcaaatttctctctcccgtaacgccatccatgacgccggctttgctctgcccgtacacaaacagccatactatactaccagcaagttactatggagtacttgcaaaccactactccatccattccaacttgcttcatcttcatctttcccacctccatcacctcaccaacagcaccagcgcaggtcgctgtctccgaaatatcatttcgtttttaattatcttttnctccaataccatgatttcaccatgatttgcctccgagccgccttccccttgacctcctcccctctccgccgcctcgccctcaagccctcctcctcccgcgccgccgccgccgcc

SEQ ID NO: 818 - DNA, 1379 bp, Oryza sativa
  misc_feature (1)..(21): n = any nucleotide
  misc_feature (103)..(201): n = any nucleotide
  misc_feature (306)..(306): n = any nucleotide
  misc_feature (465)..(465): n = any nucleotide
  misc_feature (486)..(486): n = any nucleotide
  misc_feature (738)..(752): n = any nucleotide
  misc_feature (1022)..(1022): n = any nucleotide
  misc_feature (1047)..(1047): n = any nucleotide
  misc_feature (1054)..(1111): n = any nucleotide
nnnnnnnnnnnnnnnnnnnnncgaggtggtcaccgggaaggtcccgtcgacgaggacggcgacctggcggagtgggcgcggctggcgctgagccacgagtggnnnnnnnnnnnnnnnnnnnnnnnnnnnnnnnnnnnnnnnnnnnnnnnnnnnnnnnnnnnnnnnnnnnnnnnnnnnnnnnnnnnnnnnnnnnnnnnnnnnccccgagcgccggcccaaggcgcacgacgtcgtcaggatgatcgacgacatcgccgccggctccgccgccgccgccggagacggggaggcgacggcggggcgagnagctcgcgctgcggtgagctctgcacagaatttgccgggagaagtgttgtatccatttgtagctgtgtttgtgtcgattttaggcctcgtttggcatgggccagaattctagttcaaatttgaagttcatcttgggaaggaggatttggcccatttacnaaaggaggcttaatcttttcnttaatgtaaagttgagattgggatttgatcggtttttaaatttggcccattagtcttgttaaactttttctgggggaaaaaaactcaactacccagaggtgcctatgtctgttcaaacggaaggtgtacaactactttagcttgagtacactccacttataaaaatcctctttaatcttaacaaactaaagtgcaagccatacaaaccatgcgtgatccttgctggagaatggagattcaatccatgtggcnnnnnnnnnnnnnnncacaacatcgcagacaaaaattaagcaacacgggatggctaaatccacgtcatttagtccaatttaagcaatactaatccctccaaaccagaagaagaagaagaagaagaagaagaaagaatcaacaacttaaagcaaaactaaacttgcaaatcacccaaacaacccccccccccctaaaaaaaaaagaactcatccatttaccggctaataaaaccaaattaaagccaaaaatccacatcattacttcaaccccttcccatttaatcncaagacgaacctaagcacttccaantcaaatnnnnnnnnnnnnnnnnnnnnnnnnnnnnnnnnnnnnnnnnnnnnnnnnnnnnnnnnnnatcctcccatccatgcatcagatgcgcccatcgcttgaaggagagacgccgagacgatacctactccccggcgcgtccgtacgtgggtgcgtgacgtggcggtgacctgtcatgtgggccccactccccccgcgatagagatgaacacgaactcacgcacgcatcgtcgcggcggcgagacgtgccaccgcttcgccccgcgcgcatgcacacgtgtcgcgcgcgcgcgcccggctccgccacgttataagctcaccgcgacgcggcc

SEQ ID NO: 819 - DNA, 1999 bp, Oryza sativa
  misc_feature (1255)..(1255): n = any nucleotide
agacgttacgtcgagggacgccgatttctgcagcgagaattgagcatatatcaaatgggatgacgggatcggggtggaggatgtaggttgcatgcaatgcactcaggcccgagagggacccatccccgattgcggccacccgggcgttccacggccgttgctttcgccgatcgcaacgctccaactatcaagtttggacatgtgtgtgactgacaccaacacgaaagctatagcatctgcccattatcacaccaaccctagacagtgtagcccacaccgatgatcgatcgaccgatcgattgggtagccgcagccgcagctggctgctgggaaaatgaccgcacaaacagaactcgatttgtatggttcgttttaatcggtgtgcatttgtttactaacaaaagctccaagtttttaatagaaaaagaccaaaacttctcgttcgtgggagtgaaatttcagttgaaaacggaagggtgaagggggagagtagaatgatcgatcggtacgtgccggagtgtccaatcgatcaattataactttcgtgactggtcttttttaaaaacctgtaacgacaagaacatgtggctggcaaaacctagctattatagcacggaggcaaacatatgcatcggtatggcagcgcctctgtgccgctgtgtgtgaccccagcatcgatcagcaggcaggcagcagtctctatctcgctcattatctttggccttatcctccctatcggaaaaaagagctctgttcgaactgttcgttatttaatatagcatggaaaataaaggaaaaaagatagtgaacgaacgtttgaaccagggtacagctacgtacgcacgtataatctacttgactttggacaaaggaaaagaaagaaaaaggcttgacagatctcttccccgtgtgtacgtttatacgcgtgactaactccagcatccggaccggatgatcgatgcatgcattgatgagaagattagagcagcagccccaccctaccgtggtctgtggatacacagcgctgacgacgagggagaggagacgacgaacagtccaaaggcgcacgtgttccagcagcgccgtgaaaatggtgcaatgcatgcgcgaacggtctcatatgcagtctcgaccgatcgatctcatctcactactcggcatcgacggcatgcatgcgtgctagctactccctccgtcccacggtacaaggaattttgagtttttttttaactttggaccactcgtcttatttaanttttttaaatataaaaaacgaaaggttatacttaaaatactgtagataataaagtaagtcacaaataaaataaataataattttaaaaaaatttgaataagacgagtggtcaaacgttacaagcaaaaattcaaaatccacggaggagtagctagctaccagctgccctcgtctagcacctgtttgcacgacattttttcaaagcccacctgaccccgatcagagaggccacgccccgcgcgcgcccaccttccgcgcaccttcaccctcgcctctctctcaagtctcaacgtaggcagctacacgtggatcgcttggccactgatcagtgcaacgacggcgtacgtgtaacgtactaacgtgtacccgcgcgatggcgaggaggacgtttgcctcgcgattgggattgggccgattgggaacaagacgaacgcgcggtgtgtgcgtgcgactgcgactggttcgcggcttcgcgcggtgagtggatctgtggaaggggaagtctagagggaagctaagcataaatagccgcgaatagcaacgcccatcggtccgttctctaccataccagtagcagctaattaagtgggtgggttcgcttgcttgctttgcttttgcttggagacgggagcgacgctggcttcagcgattggcgtggagaagctagattgttggtgcgactttccgaccgcgaaaatagtagggctggcaaaccggtggccggccggcgatccggccgagggg

SEQ ID NO: 820 - DNA, 1720 bp, Oryza sativa
gtttcttaaatttttttcttagagataaactatttatgaatgttggcatctttttttttacctaaatctggctgtaatattgattttcttccacacctagtaataattgctattgggattatttttgttcccacaaccgctttatttgagaccgccaacacgggtgcacctcacgcccctcgtgccgcatgtgcatacatacgtctgcacgtgtacacgctatacaagactagccccgagcatgctttcctagcctccttcgtccttgtcggtgatcctcctttacccttatctttctcctccagcttgctacctcgtctttcctccatggtacctcgtcttctccacttatccaccatcaatgttcctgacttcaatttttcgttgccttggttttctagttgtattttgccccatccattaggccatagaatcaaatccatctccagcgggtgccaccaaatattgcggcatcgccatactgatttgttggactctaaggttgaggcgatctatatccggtaacatgattactcaattgaagttcaaatcacttgcatgatcaatttgtttcccctctagctacatcttctttctttcatttgcctttgatactactattagaggtgagtttttccttttgattttttttggagggcagggtatggcgggggatgctgttttttttttgtttttttggggggggggggtacccaggaatagcatgcaaaatttgcaatctcaatgtttctagttgatacttgtagcgttagttcgtcacacatgtattggactattggtagcaccatatgggacactagtaattattttttccagattcgtcacaattttgctaccaattaattaggctggtgatgacacatatagatatttgtgcttctgcaagcaagtaatctaagtacattttgagcatgtaaatcctcctggctggtgctattttccttttaaacgagtggacaaataacaagtgcagtattggcgcgattaaattgtgtgaggtaaattaaaaaaaaatctccacatttcatttttgtttatacttaccagtagcacattgttctccttactatacataaatatgtgaaccccttaattaagcccacaggacaatgtaggtttcttggccggcataaatagctaccagaaaaaagctgttaatccaaaattacaaagccatcatttccaaaatctttatccaaagaattcagttccaaatatgtctcattagtaatggatattaatccatcccattctcacactcaaagagatcaacagaagtgtgcacacaaccaaaagggcaagaaacgccactgcacgcagccaaaagttcagcaagcaaacacaccgagttcttgttgcacccggcgcccgaggacgtggtttgcgcctccgccgccggcgtgatcctgcgaaaccggcgtgtccgggctccaggagcccgcggcttcgtcgcggccgccatggcaaaaccgggggttcgctgttctttctttgcctgacgaaatgtgtcgtcaggtggtgcactcctcctcctcctgcttctgctgctgtctgaaaagcctataaattggaggatttgatggctgctttacacacaaatcatccatccatcgatcgatctcgcattcattagcttgaattagctagttggttagtgtgatagtgtgtgtcgatctggtgtgttttgatcgagatgtcg

SEQ ID NO: 821 - DNA, 1999 bp, Oryza sativa
aaatgacatcaagaataagggcatccaaatactccctccattccaaattaatctatatatagttttttttattattcctaaatgatctacatatttattcatttattaagcctattcgttatttgtgcattggagtaaatggacattgatacatgcatccatgcaaacaagtatttataacccacatgcaatatcttgatttactattggctagaaaatagtggagatggtgcatacattgctagagtaaatatagtatgagaaaattattagcttttcttggtcttggtgtacctctaaaatatgtatatcaatttagaatggagggagtattcatcattactccccccgtcccataatacaagggattttgagttttagtttgcattgtttgaccactcatcttattcaaaaaatttgtgcaaatataaaaaacgaaaagttgtgcttaaagtactttagataataaagtaagtcaaaaaatcaaataattattctaacttttttgaataatacgagtggtcaaacagtgcaatcaaaactcaaaatcccttatattatgggacagagggagtatcaaattaatcctcattggttaaggtgcttcatcgcttcatgtcctgtgtattgctcatattttaaatattgcataccattacacgaatagaaattattttttattggtttcatacaacaccatttaatgatgcatatttactctttgaaaaaaaacactttgttaaatgatgatcattttgagaagacctcaaaaatcttagaggatgattaaaatggaatggagggagtaataagagcaggtacgataacagactataagccagctataaacacatattgagaagataaaagaggaaagagaagagcagcgggctataacagccagctgcaacatagactccaagacacaatgcatgtatgacaggtaagaccatgtattaatagtataatactctgtatatgcttatagataactattgtaaatcgaccatagatgatttagaactaataattggctatactattaaacctgctctaattaatgaatcaaactgtcaccaatgaatgaaattagggcctggtttagttacaactttttctttaaacttccaacttttccatcacatcaaaattttcctacacgcataaattttcaacttttttcttaaaacttctaattttggcgtggaactaaatacactctaaatataaaatcctgggcaataaatgctcgggctaaaacaaggatggaacacgtcagcgggtccatccctatctcactcggtcggtgctagtactgcttccacgagatccatccgagcagcagcagcagcagtagccgccgccgatccgagaaaaagaagaaaaagaaaaagaaaaccagcaaccgaagcgacaactcctctcccgcaacttcaccgtctcgtctcatctcatctcgtctcgccccgctgtaatctcgtaccgcgtcatctcgcggagacgcgagaaaaagtccgcgcgcttctctctctctctctctctctccctctcgtgggccgctgcccgcacgtcgcactcacgaccggacgccagctcacgaatatccacccgatttaatcccgcccccttcgattccgccgctccgcgcgtatcgcataggcgagttgtcgtatcgatacgcgcacccacttatacataagccgacctccttatcgtagataagcaagtgggggtggcgtggggagagagaaaagggcgagaggtctgcaacgcatcgaagaaagcgagactaaagtttctctctcctctcctctctctctctttctttctctcgcgacctcctcctccttccacatctccgtctctctctctctcatcacgaggggaggcggcggcggcgacggggaaaccctagaattcggcggggtgaagcggtgaaggcgcccgcggcagatcggagccgggaggggggtttcagcggcggcgggggggcggcgcc

SEQ ID NO: 822 - DNA, 1999 bp, Oryza sativa
  misc_feature (252)..(252): n = any nucleotide
  misc_feature (258)..(258): n = any nucleotide
  misc_feature (260)..(260): n = any nucleotide
  misc_feature (831)..(831): k = guanine or thymine
  misc_feature (1306)..(1322): n = any nucleotide
  misc_feature (1363)..(1363): n = any nucleotide
  misc_feature (1383)..(1383): n = any nucleotide
  misc_feature (1385)..(1385): n = any nucleotide
  misc_feature (1387)..(1388): n = any nucleotide
  misc_feature (1391)..(1391): n = any nucleotide
  misc_feature (1425)..(1427): n = any nucleotide
cacatgttccagcgggataagaagaactacatggagtggcttgatacacattcagagaggtctgttgtttacatatcatttgggagcatactcacatatagcaagcgacaggtagacgagatattacacggcatgcaggagtgtgagtggccatttttgtgggtggtgcgtaaggatgggcgtgaagaagatttgagctatttggtggataacattgatgaccatcacaatgggatggtgatcgaatggtgngaccancnagatgtgttgtcccatccctccgtgggatgctttgtcacacaatgcgggtggaactcgactttagaagccttggaacttggtgtgcccatggttgctgtgccgaattggtcagaccagcccacaattgcatatcttgtggagaaggaatggatggttggcactagagtgtatcgcaatgacgaaggagtaatagtggggacagagttggcaaagagtgtcaagattgtcatgggagacaatgaggtagcaacaaagataagagagagagtaaattctttcaaacataagatccatgaggaggcaataagaggtgaaacaggtcagaggagtctccaaatatttgccaagacaataatagaatcagattaaggaagtgaaactaatttcgaaaccaatggaaattaatgctgtgaaaatatcaaattaagttgtcttttgctcttaatgaatttgtagaaagttagaatatattaatcttaatgaattgtcaacatgtctatatagaagtaatacatagtctttctttttccaataaattaaatacagtaggacaatagctttgtctctttkgttttttcacatgactatacgagtacctatgattattggttgcttgggcagttagtgtgcctatgatttctatgccgaattggtaaaaaaaaaacaccgtccaattgttactcattatcatttgtcgtcggtcctagaggcgtcacttgaaggtctacttcctatcaaactttttcttcaaagggattgtcctcttgcagcagggatagcaaggtagagcagatccactattatctcttagacatctccccctccaatccaaagacgtggatggagttgagtgcatatgagacatggtgtttgtattgtagatgtatgacgtggccttttcttttctaattatagcctagcaggttatatagtgctacaatgtaatttgtattcttgccatatcaatatgaatataatcttcgcggtgtctttcacgagtgtttttttaggaaaaatataagtcgtatattttcttaacgttagnnnnnnnnnnnnnnnnnacggacatgacatagtgtctcaggatcggtaccattaggcntagtttcagcttctgccgcngncnncgntctagcccccacctgccgtataagtcgtatattnnnttaagtttagaaatgcctatcaggcctagtttcagctcccgccgccgccgcgctctagaccctgcccgtcgccgctccatcctgtgctccccgcggccgaccgaaggggagagaagagaaagagaaaaaaagagagaagggaggaagaggggaggaagaagaaagagaggaggaggatgacatgtggggcccacatgtcagtgtgtcccacaattttttatgtgtgtgaatgacaaacgggtcccacatatacgtttttaattcaaatgccacctaagcgccacgtcaactccacatactaggtcaacatcactacgtcagcgccaccgccctccaaagctaccaagggagtcaaattgcaccggtttcaatagttcagggggtcgagatatccggttttgcaagggagtcaaagtggacttattccttgtgaaaaatacaagggaaaattgtgtaccagtgtaacctcggcccaagcatatataaccgggccagattgtgtccagaccaaatggtgaaatgggccaaagattaaacatgggaaagtgccgagcttactagccaaaatcggg

SEQ ID NO: 823 - DNA, 1999 bp, Oryza sativa
  misc_feature (468)..(468): n = any nucleotide
aattaccttgtgtatataaacttaaactttctgcatttaccataaactcaagagtgttttatcaggaaaatcagaatgaatatagtagataagtggagataactaggagaaaaaacgaagcggatagttttcagccggtccagtgaaaacgaagcatatagttttcagccgctctggtgaaaaacaaatatggataccattctgtgcgtataatttttggatagtctagatacggatacagatacaaatattcttttctcaaatatgaatatgaatatggtatcatagttttcgataggtatctctatctctactacttaaaaaattagaagtgtttccattgtccgtccgtgaaaaaagggcgaaacgaaatcgaatcaaattatatgtgatgcggtaaaaaaaatgcgacacaataaaaaaaacaaatcgaatccgattccgtacgtgaaaaacagggtgaaaaanatcgggcaaaaaaaagtccgattcaatttgcttccgttgtccgtgaatttttttcatccgtaaatccgattgaaatccaattggacaatccaaagaaagagaaaaggaacatgaaaaataataaaaagcgcacaaatcttatctcaaccccgtgggaagccgccgacgccgctgaatccgtccgtgggaagtcaccatcgccgccgaatccacccgggggaagctgacgctgtcactcgcggtaggggagggcagcgccgccgccacttgcagccaccaacgccatcggatcctcctaggggaaaccgacgccgtcgctcgcgatgggggaagggcaccgccgccgctgctgtcgcacgcggaatgagagagtgccgccgccaccgccgctcgctcattgctgggagaaaggatcaggatcgagaacgggggaacgtgagggttagggtttccaatgcacatgcatcttcaatggtgcgcaggcgatccaagccatctatcaaatcgaatggctcagatcacctccgcttcgggccgcctccatcgccgggctgcacacacttgatggccctgccatcaagtgtctacaacgcaatcagaggaggagttgggggaggcaaattagacttgatttgcgggctgagatagtaaatcgactgaaaatggcccatagagaaattgggatttttatttaaataaatgctgaaatgatgtttgtattgtcaaaattagcaattaagttccgaaaattccaacaacaaatttcaaagagtgttattaatcatggttaatttaataaaaattaaatcgaactatatcatattatttcgctgcacaggtggggaaatgtgccgccgccatcgctctcggtgggagagaagaggaatgaatttagggttaggtatagatttaattcattgtttatgtttagaactatctcatataactcccatggaattataaaataactataatcattatcataacattagtttttttcccattgcaacgcacgagcactttttctataaataataatacagatatccggtgcacaataatatttggatattcgctgaaggcataaaaacataccccatttcgttctagctctagttctagtcttttaacattagtccacactaataattttatttaaacttttaaatatttttttataaaatatactatatgtattatgtgttgtaataccagttagacatgtatttataccaataatattgtacatgtttagtttatgatcaaactttgtgtataaaatgagcttaaaatatattatggtatttgtctgtggtttcgtgttctgataaatatttgtttctgtatttgtgttcgatcttatttgtattcaaggtaatttgtattcgtttccgtatctaataaaagaactacgaaaacaaatcgtatgatacagttcgtttttgatatcgtagggggacaataggcaatgatacaacggaagtgaaaatatatacaagagaaaatagaaaaagaaataattgggctggag

SEQ ID NO: 824 - DNA, 2000 bp, Oryza sativa
  misc_feature (1941)..(1941): n = any nucleotide
  misc_feature (1943)..(1943): m = adenine or cytosine
ccggcctaggagatctgcttagctccagtgcaggtccaaatatgatgagatgcgggcgtgccagtcagtttgatcctgcaactgacaagatatgcaaatagtagatcaaaacagccaatcggctgacaagccgatggagtagttccagcagatagccgataatagccgatgccgataccagccgatagcgatagggtttaagcaatcggctatatgtccaatgtagataatgatataaaggcaatcggctactgataataaaatataacaataatatccaatataaaccaatcggctagcaatgatatgataaataagcatcgatccaaaggttaaagcacacatcggctggaggtccgatgtcatgaaattcataagattagattaaacaatgaaacctttgttgtcatcggctaaatccaacttatatgtatatgcaatcctcatgagccgatgcaacgtccagataactcaccggctgaaaccccgatgaaacccttattggcaatcaataagcaggctagagattatggttctaaacttaactgatgcagcactaagtatgaaaagaaacgcaatatctagacaatcaagctgttgactgagttttcaaggtggtagatgtctaagctaatctaatctagcaaggcgatttagccgataccggcagaaaccctaaaacgagagacagccgatagagctaaattgatatgctaggactagattaatagagacatatgataaatagccaggcaaatatatcatccaaaccacagtaatccaagaggtcaaatgtactgatgcagccttaaacgacgcagacgtagacgatacaattgcctggaccggcggaacattagacttatcccttcgccggagatcgaagacgatgcagccccgcgttgggtgccaagttccgccggaacgtaaaaacaaaagtagaagtaaaaagggtggcgatgcgccaaattgtattgatcgtgaagatagattacaatgaccccgggtgtacatatttatacccatgggttgatacaagtccttgtcagacaagaaagaaaccttcctaaagataaaaggaaaagataaagtccttataggacactaaacacactttcctaaagataaaaggaaaccaacaaactattcctatttaatagataacttgccatgcagcattctctttaaactcggtcacttatggataagcttccgttagtagattgattttcttagccaaatatagcaggaatccgattattagcgacttgataactcccatcggctgatcccgagatgctgcagccgataatgactctaagccgatgacgtctttgccaattaccaaatttcactgttaacagaaatgtgctactattaaaatcgaaaaatatatattgaagatcgtagagttataaagaaatgtgatatatctcatggcttcagcgggtatccgaataacacagttcaccgtatatccgtatccgttggaaatcttgatacgtatttgtattcgtatacaggagaaaatatatgtactcatatcaaaatccgaagtatccgagaattatccgccctgaaaggtatccatatttgtttttcttcggagaattatccaaactatttgctccatttttatccctagttaaggtgacgctgagaagatggtgagagccagcgttaagggagatgtccgcgacgttctcctcctcgctgtcgaaggtctcggctgcggaacggtgtggatgacgtaggtatgaaacgagataaaagataagttggtacaattactatgttcttagttttgttaaacatgtctaaaacgtaaaatttgcattggaccattgtaagacctaaatttgttttttagttttgaattgtttgttattttaggggagaaaagctgaaatttaatcatgaaatggttttactccctgctcnamtcactccagcatgctagtctagtctagttgtagcaaaaaccaaaatgtagaggggcc

SEQ ID NO: 825 - DNA, 1882 bp, Oryza sativa
  misc_feature (57)..(57): n = any nucleotide
  misc_feature (61)..(61): n = any nucleotide
  misc_feature (139)..(200): n = any nucleotide
  misc_feature (1511)..(1511): n = any nucleotide
aaggtttgacaaaaaataattaggactaaaacgcaaaatatacctttaagtggtccntaangtggctttatcctatctatacattctatatagttggtacccattaacaattattagaagctaaagctcaacatgcaannnnnnnnnnnnnnnnnnnnnnnnnnnnnnnnnnnnnnnnnnnnnnnnnnnnnnnnnnnnnnatgccacatcttcactcactagcaattactattattctagtatattttaaatcccatacaagcatagcatatcatctacaatattatattatagagataaacaagtatgtgttaatcatctttctcacattattttctcaactttttagcttttatcatttcaatagtatttaacatatactcattcataaatcccgcagcaaagcgcgggatattatctagtatatgacatgttgagaccgctgatagtctttattggccatgttcttaggtaccacgttggttcaataaaccaatatgttgatttgcatcctagggttggcttggagtacgtagcatattacaacatccacttttagcatattataatgcaaacatgaataatccgtttcacgactattattgttatgctttattttgttagaaaacatatttttcgatgcatatagcaaataattcattttaataacctgatgaataagctatgactatatatagggatgaaacctacacaaaaaatctagctttcctagttaatatttatgctgcagaaaaatatagtatacttcccataaatgtttattatttaggataaaattttatgaaaacatttaaaatttgaccaataatttgatattaaaacgagtttataaaattaaataagtgaatcatactatgatagtataatttttttaagataaatctatacatgcattttatttaattttagagaaagcatctcataagttatttatgatcaacatttcaaaatattgtaacttgaggatacaatatttctaacttgatggatggactgagtaaaagacaaaattaccttcattttaaaatttaatacggactgtatattttaggatagatgtaggaccttttaaaaataatttactagtattttgtttgtttatgaaataatatgaaaaaaaggaacgaaaagagcgagagaacacgaggcaggcccaggggaggccaagttgggaacgggtccgtgtcttgtgggcatcgctttcatcactgccccgtcacgtcggtcagctccggcctcggaccgtcgctgcctctgcgaattgtgctaaccgccgtcgccaccttccccgccttggcttataaaatcaaaaccccattctcctgcgacgaggagagacaccccatcgccgccggctcttccccgtcgtcgtatccgtatcccaccaaaccttccaaccaaccaaccacctcgtgctcctcgtgcgatggagtccctcctcgccttgccctctgtctacagggcttcctttccctgggcctcctccgccntcccgctccccgtcgcgggctcgcctcgccgtcacgcccgccggcgccggcgcccgcgcccgcgcccgctcgctcctccgctgcggggccaaggtgagtacccctgatctcctttcatcttaggtttaagtgtttcttccccctttctagcctcaatcttgctgtaatccaacccgcgtaggttctttcttttccttttaattttccccatttcttgagcacggattcgaagtctacatggtgttttttttgccctcttttgagcgccatttcggagtatttcttgtttcctgtttatatccgtcgtttcttgaaatgctcctccatttttctctaaggactccatactcgaggagctagcgcaggacgac

SEQ ID NO: 826 - DNA, 2000 bp, Oryza sativa
  misc_feature (3)..(8): n = any nucleotide
  misc_feature (16)..(18): n = any nucleotide
  misc_feature (33)..(35): n = any nucleotide
  misc_feature (37)..(37): n = any nucleotide
  misc_feature (40)..(46): n = any nucleotide
  misc_feature (48)..(90): n = any nucleotide
  misc_feature (118)..(118): n = any nucleotide
  misc_feature (123)..(124): n = any nucleotide
  misc_feature (126)..(126): n = any nucleotide
  misc_feature (139)..(140): n = any nucleotide
  misc_feature (145)..(145): n = any nucleotide
  misc_feature (153)..(157): n = any nucleotide
  misc_feature (175)..(177): n = any nucleotide
  misc_feature (904)..(904): k = guanine or thymine
  misc_feature (1858)..(1858): n = any nucleotide
  misc_feature (1878)..(1878): n = any nucleotide
  misc_feature (1919)..(1919): n = any nucleotide
  misc_feature (1924)..(1924): n = any nucleotide
ctnnnnnnctagttcnnncgcttcgcctaccgnnncnccnnnnnnngnnnnnnnnnnnnnnnnnnnnnnnnnnnnnnnnnnnnnnnnnnnttggctaggcgccgaacaatccaagaangcacnncncacacatcgtcgnngacantgatcgcnnnnnagaaaaagacaaagagcnnngtggccggtggattggatatataacttagcctcgtcgtctccagatgacggagtgtcgcccgccttgaagcagacgatgccgcggcgaaggcatgcgccggccggccccccaccaccgccctggtgcagcgcgacgctgggcgccgcggccagcaccatgcgcctcgcggtcgtcgtcatcgcacaagcaccaccgcccggcgccaccatggcgacgaacgtggcaccggggacgccgacgagcgctccggcggggagagccagcatggagatggggaagagaaacatggggctgcactgtacctccatgaggatttcacgagacgagacgagaagcccttgaagatattctctcctcctacacgaacgaaacgaactaaccaaagctaacaccaggttcgagttggtgagctagctaaggtcctttatatagcccagcgatgcatatgcgtggtctaccgtcgtggactcatggggaacaggttctgggcgtattccgaccgccgccgccgccgttcccaccgccgccgctgccgctccccatcgccgtccatgccgccgctccggccaagagaaaggccgagaggagagagaaataagggagagagaggggagaggaagaaaggaaggagagggaggatgacatgtgggtcccacatgttagtggtcccacaacactttttttttgtgtgaatgatatatgggtcccacatatttttttaatttkgtttttattctaatgccacgtaagcgccacataggacaaagaatcggtcaagactgccacgtgggcgtcacgtcagacaaaaccacctctaaaaccaccgagggacattgtttgcaccggtttcgatagttggaggattcgatattcccggttttgtggttggaggttatgaatgatactcaggcgatagttgagggagtcaaagtgtactttttccttttagatataaactgctactagtagttagtactgtattactgtaagcccaaaagtaataatataacgattttgctatatctcatttgaaagattttttcttatctctcactcgattttctcactcaaatttacagtgtattttcttgtaagttacagtgtaatttatgaaacttacactgtaacttttgtaagttacactgtaatttttgaatcttcacatgtaaattttaaattttgtatttgatttggtctttttcttgaggatatggtaatttaatgttcattatggtgtttcttaattgcttttttctttttattatatctatcggattttaatacaaagattaaaaatctgtgtgatacgattataaaaatctttcgaaagatgtataggtactctcataatataatgtgcagtagttcatgcagaggcccgacagcccaacacggcccatggaggcatccacgttttgaacgagcctggtggtcccacatgtcatggcactagcaattttgttttgctttccacttccccacggggcccacactggtcgtcgaccatctcgccctctctggaccatcacacctaccctgaaatccgacggctcagaaccatcttccaaaacggatcggacggtcctcgaagccctcaagacagccacgcacgcggcccgcgccgcccaccattttcctcctcccccgcccccaccccacgcagtccccttctccaacccngcttcaaatttggatcgcgncgatttcacgcgccgattcccccaaatcgcacacacccccnccccncgaacgcataaatactgatccccaatcgaaacggctgctgaaaccctagccctagcaatcgagagagagggagaag

SEQ ID NO: 827 - DNA, 2000 bp, Oryza sativa
  misc_feature (883)..(883): k = guanine or thymine
  misc_feature (884)..(884): n = any nucleotide
  misc_feature (885)..(885): r = adenine or guanine
  misc_feature (886)..(886): n = any nucleotide
  misc_feature (889)..(889): k = guanine or thymine
  misc_feature (890)..(890): n = any nucleotide
aatgaggtggtagattgtatgaagggaaattgtatcccatgtttggtttgatggatggaaaaatgaagtttctagactaatgaccaaaatacccctccttgcaataagtgacagatagaaagatagaaaggggtcaaaatggcaaggggctatttggtaatttcacctagcaatctatccacccctcaatccagcaggattgcacatcccattttctatctatccaaacggcagaaatctagaaaagggaaatgatatccatttcccaccctcctaatcccattagccatacgcagcccgagtgtcttccccttccctttgtggcgtaaaagaaagaaaatctcccgtctcctccgctccttgcgccgccaagacgagtcgcggctgaacaggggaggggcggcgatctccatctggcgagcagagcaggcgagaggattatggtgagcatccacatcctcttttctgattcatctctctctcccatcgggtctggaatttgcttgcgttcgttcgttcgttaaccctagcttctcttctagatctggaagaagctcttcccttaatttcagagccttaaccttaatacaactatacaagtaacagtttgtttgttccccgaaaagtttgggggttcaactgaacccccatgtcccaagttggatccgcccctggtttttttgtggtgagctgtttggtaaaattgattgcgacgttgggatggggtgcaagcattgttagccgtggtggagctcccaagcctgtaagtcaattctacacgctgagctgtagctgtcggcccaacgtaggcatgtgtgcttctttcaggacttaggcaataggcatgggattgtcatgttcctttccccaatttatggaggaknrnagknggcgtcaatgccactccttgcaaattactatgaagaaaccttttatgaacttcacatgtgcagaagtagaacagtggcgatacttttgccgagatgtttgaattgaggagggcagatgtaattcaatagaagcgcaaaatatttgagcgattgtgctgatatctctttcactctttgtagtaaaatcaatttcatggttaatataggacacatagaggacaatcaatcattcatgaatttgatctgcaaaaaaatattttctggagtccaacatatactaattcgtttatttcttacccaaaaaaaacacagaaatattttagtccgtgaaatgtgcaacaccattcgtgctgcagaagatggctgcatgatatttttggaatatttcagtttggtatatagaatttatttggttgtgaggtgacggacttgtcacttgtgcaataactgctgtatctgaggattgttgtgactcacacagatgtcctaaatccatctactactgtagcctgtttaatggcaaaacaaaagattgtctgtagatggtcatttcatactcccatatactccctccgtccctaaaaaaacaatctagtactggatgtgacacatcctaatactatgaatctagaaatacctctgtccagattcgttttactagaataagtcacatccaatcctagattcattttttgtgggacggagggagtatttgtcagtgtgcgcacgcatgcgtagagtcatatagaagattggatcatgtgtttacccatgtggatttatatgtttcttgcacatggcaaaatgtgatgtcatgttccaaatttctgtaatgtgatttggcccttagcttaactgagctgcatggactgatggtcagcctgcaaagttcgagtattatgcaatttatggtaaagtcaatgcaaatcaacagtgtttatttctctcatattaatttgctaatgcataaagcaaaatagtatgcttcaatctggtgaaatatggtttttttgtttttgcagttctcgtttctcctaccctacaggatgtttagataattcgagaccctagctttgaactttgagtaggttcagttcttagctgtagaag

SEQ ID NO: 828 - DNA, 1999 bp, Oryza sativa
  misc_feature (39)..(40): n = any nucleotide
  misc_feature (42)..(43): n = any nucleotide
  misc_feature (45)..(45): n = any nucleotide
  misc_feature (57)..(57): n = any nucleotide
  misc_feature (96)..(96): y = cytosine or thymine
  misc_feature (1153)..(1153): m = adenine or cytosine
  misc_feature (1168)..(1168): r = adenine or guanine
  misc_feature (1344)..(1344): r = adenine or guanine
  misc_feature (1434)..(1491): n = any nucleotide
  misc_feature (1499)..(1499): r = adenine or guanine
  misc_feature (1502)..(1502): n = any nucleotide
  misc_feature (1508)..(1508): n = any nucleotide
  misc_feature (1510)..(1510): d = adenine, guanine, or thymine
  misc_feature (1511)..(1512): n = any nucleotide
  misc_feature (1515)..(1515): n = any nucleotide
  misc_feature (1524)..(1524): n = any nucleotide
  misc_feature (1526)..(1526): n = any nucleotide
  misc_feature (1529)..(1530): n = any nucleotide
  misc_feature (1532)..(1532): n = any nucleotide
  misc_feature (1534)..(1534): k = guanine or thymine
  misc_feature (1584)..(1584): n = any nucleotide
  misc_feature (1602)..(1602): n = any nucleotide
  misc_feature (1604)..(1604): n = any nucleotide
  misc_feature (1611)..(1611): n = any nucleotide
  misc_feature (1613)..(1614): n = any nucleotide
  misc_feature (1618)..(1618): n = any nucleotide
  misc_feature (1625)..(1705): n = any nucleotide
atcctcgccacctttctccggccagccttcttcctccanngnnancttcgcgaatantgtttctgtccagcacggattctggtagctacccctttyggcaaacagaatttgctatagggcgtcattttttccagctggttggatatatactgacaaataattccggtttattttccattagctgttcaacaacctccccgaaaatcaaggctcctacgtgcgaagcatgttattggactccggaaagtcagccactagcaacattaacgaattctgatgaaaccataccgccacaaaaatagcatctataacaaacattccgagtacgcaacgctacactcacagaaaccaattcgaaatctctgctccattcttgtacaatattctgctcgaagaacttcatcttggtgaaggattgcattcacgatgacaacagggagtttgcagtacacacaacttaaatagataaatgaaaggataacatctcaattttatttcacttcccaaacagcagaagatacagatttctaaacttagatactactcgctttttcctcatagaaaataccatacaaaattagagacagttcgtacgactaatctacgaccgtgcagaaagcaagcccttattacaattttcctgatcatcacactattgtctacatattttcattggacacatgttcgcaaccattactgttgacccgggttgtttcgttgcttctgaaattcatgtcgcaagccgcgcgaatatcacggagtgagcaccaagcgcatctcttcctaggatttctcatgggaagaggatgacatccatcgaaatgaatgacatatttctggagagagtggttcatcacttcactccgggcagcagtatccatgcaacgcacaaaaccattcctgatgaccaaataacgcaataaccagttagagccaaacaaacaaacaagagaaaaaatttcaacagaacataaactaaaactaaacttcaatgtgtacctatctgcggcaggattctgctgcttgtcaccattaactgtaatggttccatcttctgccttcgccatatgatggtgcttgctactactcaccggcgacgatgcgcctacggccgccaccgacttctgctgctcgacatcaggcgccgacgagmctccgcctactcgcrccgcggaaggcgacgcaacagacctcgccgacgacattctgccctttccaccggagagtttctgctccatcaaaaacctgcagaacaaaatcttcttcctcacaaatccgaaagataattgtggtcctcattttctgtcctccatcaccgtcaacttaaatagagtatcaatacarcaacctccacactaactactctcctggtcgctcggtcgtgcatgcgtgcgggtaacaaaccatgcatgcagaacattcaaaatgactcannnnnnnnnnnnnnnnnnnnnnnnnnnnnnnnnnnnnnnnnnnnnnnnnnnnnnnnnnctgcatcrctngtgttnadnnatntcttctcananatnncntkagtgagttgaagcccgaaaccctgatgtgagttggacaggtgtccgatgnttacaataggagtagctncncctgggngnngaanataggcnnnnnnnnnnnnnnnnnnnnnnnnnnnnnnnnnnnnnnnnnnnnnnnnnnnnnnnnnnnnnnnnnnnnnnnnnnnnnnnnnattcaaatgagtatgaaactttttcaattacttaggtattaacattaactactttactaactagttcaaagcatgtttgtactgaatttgaacttgtttttgttagattttgattctaggtatatagcatccatacatataattagttaggtatgtaatcatggattgtgaaataaagttaaatttgagttgttttgttgataggtatagatatgaatcgaattattataactaggtatatactcacaatttgaaaattttgaaaaatttgagtgattttgtacattagatacc

SEQ ID NO: 829 - DNA, 1999 bp, Oryza sativa
  misc_feature (1515)..(1515): y = cytosine or thymine
  misc_feature (1522)..(1522): y = cytosine or thymine
  misc_feature (1538)..(1538): y = cytosine or thymine
  misc_feature (1616)..(1616): s = guanine or cytosine
  misc_feature (1808)..(1808): m = adenine or cytosine
ggcggtcgtgatcatgatatcatcgtcgccggcgccggcgaggttaactgctcctctagtcgcttgcgatactacgtggagtacgtgagactagtggtgactgtgccgtgtgtgtataatttactggcagtaacaaagtgtgttctgtgttctgctttgctttaccgggagcaattacgtgttgtatgttgtacactactatcttcttgtttaataatgtgtatgttgtactatttcaatcaagtgacaactatatgaaaccagtttgttttctctacacaccatgtatgtgtgtcgagttttcgctcgaaaaaaaattgaacttctatgtttttcggtgaaccaatttgagtataatttttaacaccgaggcgaaccctgaaagaattcacgctatattttcgtatctagcaaaagaaatacataaaagaaaagataatagtaggttaaaattaagcaagaataatataatagtgggctaaagtaaggataataataagctataaatttatgtggataagagataaaaaaatatggagtattgtaaagctagctaggagtgttgtagggctagctatacacgtgtatatgtttgaagatattttcattaaatttatagtgcgagtagttaacctattcataagggcgcgagaggaaacagagaagagaaaacctattcatagtggcgcaagagaaaacctattcatagtggcgcgcgaggaaaagagaagagagaaatagggttaataaatggttcgaccgcgaatgctaagtagcgcgcaccaagctggtggcggtccctcctcagctggtttcgttctctcttcttttatctctttttctgatttttttttaattttcagcacacgtgtttttaaatattttgcattaaaaatttttaaatcatgatttgaaaattttcaaatattaactaaaaaattttaaatgtgaaattgaaaatatttatatctcaagttgaaagttttaaatctgagttaaaattttccaaaacttgagttgaaaattttaaatttaagttgaaagtttttaaatctgggtcaaaattttttccaaagttgagttaaaagtttttcaaatttgagtgcaaatttaaaggtttttaaaaatttaacttaaaaaattaaaattttgagttgaaagttttcaaatctagatttaaatttttgaaaatttgtcttaagatatattttcctttttattattctttagttaaagaaaatatcgcggaaaaaatctcttatcttctaccattattatcttaaactattattatctaatacttcctccatcccaaaatatttaagtcgttgttttttttaaatgttcgaccagcggcgcgtacttgcgaactagcgatcgcgattcgcgcggccactccgttgggggatatgctacagtatcgggccgagtgggctgtccatcatccaaccgacggtccaactgtccaactgtccagcccataacgatcccgaggcccatggactatctcacttytcacgaytcccgatgcctccggyttccacgggttcttcctcgatgccttctccggcgccgtccggtcgctccggcgccgtccgacgacggaatccctcagstccggcggcgccggcacgccggcgccgcaggagctttccggcgcgtgggggaggggagcaattaattaattaattaattaattaatacaagttggcaacagcagaagcacaccacgagcgccccacgtggtcagtggtcggcctcacttgactcctcctcacttcgcattgaattcgatcactctgctctamtctctactactactagcttctgctgcttcttctccgatgcttcgatcccgcgccgacctcgatccgcattaactgcccctcttccgtacggaggagagcgatcgagcgatcgatcgatgctcgccgtcgtcgcgggcggcgggttgaggaggtgtgctagctagcggcggcggcggcggcagtggaggagg

SEQ ID NO: 830 - DNA, 2010 bp, Oryza sativa
ctctggcaagggcagtttggtaactgcaccccaaaacgcacgacatcccggcatcccgccaccgctccaccttcccaaaaataccctcaccgagatgcccctccgtctcccgtctcagctgctgatttctcccacccatccgcgtaattatccgcagcgtcgagggcatatatggaaaccggcacgccatttcgaaatatttcgccaagtggcgcacggctggtagtttcccacataccaccctaccctattcacaaatcccacaaaaactccctatacacagagtctctctctccccaacgccccagattatatgtaataataatatcattattatctgaggggttaagtgaaaaagcgcactttttcctatatcatccctagctagccctttcgtgggagtaaagaaaggaagagaagaggaaaaaaaaaatctcgctttcgtccgcgtcgcgtcagggggtaggagaggaggaagccgaggctccgcgagctcgcgaaaggtaagggtttccgccttatccgaatcccgaatccgcccccaaattcctccgcttcccgcgcggatttcgccgccgggcggcgagatccgcacgattcgcgccccgatctgctctgacccggcgctcgcctcgccggattcggcccccgttttgcagggtttccgccgccggggtcgcgcgggcgttcgagcggagcggaaggggaggagacaggagagggagagggagagggagagagagcgatggcgggaaaaggaggtaagggcttgctcgccgcgaagacgacggccgccaagtcggcggagaaggacaaggggaagaaggcccccgtctcccgctcgtcccgcgctggtctccaggtgatctctcgtcttcctctgctttcgctttgttcgcttcgtgggggagcgatggataggtcaggtttagacacgtttgtatcgagaggttgcttcttctgccagtatgtgtgtttagtttagttttgatatacatgcattgattagatttgtgtaggtatggcgcgtgttgttagtattttgtagaaggttttgcacgctagcgaggttgggttttagatgtttggaaactcgtcgtgttcggaggaggttttggtagatctatggaagcatttggtctatctggttgtgttatgttgattggtttatacgatttagtttgtttggtcaggcggtgttagcacaatgaagattggctgattttgctgtggagatatgctttagaattcgtgatgctaacatgctaacattacagaagaggatgattgcaggacatcgtttgtttgtattgcctaaacgatctagagtgtactgatactttgtttcaataagaattgaagctgggggattctctttcttttttaataaagaggagagaacaatatacgtttggagattttagttaaatgagagaacaatatacgtttggagattttagtttatgtgatgatacattttatttttttgctattctggtcgtgatggatggttggaaaatggaaactagatgcatgtggccatagtgtggacaatttgaggtggctgttgaggtagcaaacaagattagtgcaatttacacatttactccctctatcccagaaaaaaacaattcctagctttgcatttggataaacaattgttcagatttaaagttaggaattgttttttttctaggacagagggagtagatgtgtaatttgtgcatctaggaaggtggtagtatgccagtggcaccaactgtggtggtttcagctaccatggaagccaaccatgataggactctggtaggcaggggcaaatctatgtcgggctacacaccactggcagaggatactgggtttgattttgctttttagtttttcctctgggtctgccactgcggtatgttgcatgtgtgtgcctttcaaagtagtttttcttgttgattcttttttcctgaggggatggggatacaatgacaatcaagcacctgacttattacctcttga

SEQ ID NO: 831 - DNA, 1999 bp, Oryza sativa
  misc_feature (142)..(142): n = any nucleotide
  misc_feature (474)..(474): n = any nucleotide
  misc_feature (480)..(480): n = any nucleotide
  misc_feature (486)..(486): n = any nucleotide
  misc_feature (498)..(498): n = any nucleotide
  misc_feature (501)..(502): n = any nucleotide
  misc_feature (506)..(506): n = any nucleotide
  misc_feature (508)..(510): n = any nucleotide
  misc_feature (511)..(511): r = adenine or guanine
  misc_feature (513)..(513): w = adenine or thymine
  misc_feature (514)..(515): k = guanine or thymine
  misc_feature (603)..(605): n = any nucleotide
  misc_feature (608)..(608): n = any nucleotide
  misc_feature (614)..(614): n = any nucleotide
  misc_feature (618)..(618): k = guanine or thymine
  misc_feature (624)..(624): r = adenine or guanine
  misc_feature (1958)..(1958): n = any nucleotide
tgcttgctggcccagtgaatgatgaatctctggaaggaatctcacgcagctgctgcgtgtgaaagtgtaaagggaagaggaatcttcgtcagccaatcgatctggatttcttgcagggctcgcaaaccgtggtgttctgggnttcgtctgctgatggcaacaccgacgacgacaggaaccccaacgctgacaggatcgaacacatctccctcccccggcacgatttgtccctctgttcgtccgatcggtgtcaggaggaaagagtacgagcatcatatcgtaccacggccggccggcgacggcggttgcacggcgccccgtccgtacgacccagccagcttccatgacaacgtatatagcgacatggacacctttgaaaacatttctcgtccaaccgtgccgtgtcgtgtcttattctggatatgttcaaattcgtagtattatgacgtatttcgtactagttaatttaatttnggaagnaaggantagcccgttagnccnngtgntnnnrtwkkgcgttttcgtggtgagattagtgttttttttttggaggattttatgaaatagggtcatagtttgtaagtgatgtcaaatgaatcgtannntanatcganctgkccttaracttgttcaacaatatcccttcacattttaatggaaggagtatgcattttagcaattataccgatggttaatttggtttaaacttgaaagatacgtatatgtattattaggaagttagagtcaattacagtgacgtgttgctaatgctcgccaaggcatgacttcaattaggtgtgctagtcttgtgagttactaccgtgcatttactgtgaactactggccaccaactctggttgttgtgcatcatcggtcactacacatcagccagacactcacacatggcatacatgcatatatctaggcaacacgtcggaaaacaaacagatcatccgtagcaactatatgtaaatggtacatcagccaagaacatgatgctaactataacacatgttagccatattaatctaccatacacgtgccacacatgaaaccgtcctatatatgttagctacattaattgtactatgttgtgaaggtaatcaaaccaaaatcaccaatagcaaagttaaccactacccccaccatccaattctctaatcatccgtagaaaaaaagaatacatgtgaaatgatcatgatcaataggtgtttacctacaacatcttcgcttgtgcataaaacctacacatatagattgttaacggcttatattacccactactatatcattaaataaaatatgtaattgaaaggacatgtagcttagtggttgcagttcaaatctctataggatcaaattttagattgtcttatttgatggctaagttctatgtttaataagctaagttcctaatttaaaaagtctgcatatatctgattggatgtatggtccgggtaaaaaaaatacccatctctaaaaaaataaaaataaataaaaaatgtatagggccttttttataaatttttgctctacatactacctatatttttaagaaaaataaaaatatacaaaactttttaaatctttttattccggattcgtcaccgatgatcttcgtacgtaagcaatattttttgggccgtgacagagctcagtccatatggctcacacccatgccacgcccacgccggcggtggaccgttttttacgcacaagaaaaaaaccggcaaggagttgacttttcttccccggcgttgaccaaaaggagctcgtcaacgtggccaccctcctggccgtcgatctccatctgcacggcctccgatgcacccctccccccaccgctcgccgcccctcgaccacgacgtgtcccgatgacgtgtcgccgccgtcgagctatatatatactcgcctcgcgagctcggctagcttctcaggtaggccacgaactccatagnttttttttttgtttctctttgcttcgatcgcttcgttctcc

SEQ ID NO: 832 - DNA, 1999 bp, Oryza sativa
  misc_feature (345)..(345): n = any nucleotide
  misc_feature (385)..(385): n = any nucleotide
  misc_feature (473)..(473): n = any nucleotide
  misc_feature (497)..(497): n = any nucleotide
  misc_feature (720)..(720): n = any nucleotide
  misc_feature (721)..(721): y = cytosine or thymine
  misc_feature (1771)..(1771): n = any nucleotide
  misc_feature (1811)..(1811): n = any nucleotide
taaggctgccaaaactgtcaagaggataaactgctagtggttagcgattagaagtaaatttggactgctgggttgccatatgtctacaagctacaacaggcgcacaagggaaaggagcactttattctatatttcatcaagcaaaaaacccttgcatgttcaatattctaaaaatcggcgcagtcatcacctcggtggtttttaggtgcctgatggtgagtccctgctgccctaatttttctcaccgtcgagcacctagctaacagccaccgatgcagcaagggctctcaacggcgagagatatgtaaggagaaaaattaggccctaatcggcgtgctaggcagngtagccgcatttacctctaaccactactacaaaatcctanataggggaccgtgtgcagatttctaaaaaaccatcacatttaacctcttcacaatcttcacatgagtctaagattaaaaaacgatacngacatgcctttataggtgcaagtntaattaaaaaaaccagcacatataaatacatgtgctattttttttaaaaaaaatcagcacctagaagaatatatgagtaccggttttctaaaaaccgacacgtttgtgaaagccgagccgatgaaaaccgagctgacctaatttttcttctcgccctcctcacatatctctcaccattctcactgctctccgatccccttttctgtcctcgttgcctccgccnytcctccccctctcttttgctacctccttgcctccgccgaccctccccctctcctccacctcccttcccctgtcttccgtcgccccttctcctctcctcctctctgctcggggacggccagatccgccgccgcgtgcttagggacagccagatccgccgccgcacgctcgggggtatccggatccgccaccacaagcacggggcagcccatttaacgactactgtggctccctcaactccctcaaccaccgtgtgcttgggggcggccgaatctaccaccgtgcacacgaggacggcctactcacaacagcggcttcctcaactccctcaatcgccacaggcacaggggtggctgctcaacgacgacggtggctccctcaactccctctttgtgttctcctctgtgttgttaattttgctcttgaatgttgattttataattgtgttcttggatgttgatcgattttagggatgatggagagttgcttgatgcatcggctcgaatcgagcaacctttgttttggattcgggactctcaaagatgtcggttcctaaactggcacctaagattcctcctcatcagtgccacctatgaggtgccggttggaaaatctggcacctacgtaggattcccaactggcacccattagggtttatgtagtagtgaatgtttaattattagtatatatcttggtttgaaagtaaataattgtatgtaaattatgtttatgcaaaagttttcaaaattgaatttgttgaaactcctacctttctcaccaacgaacaataggttggcacttccaaatgatgttttgcatggacaagattggttgtgaatgattgatctacgaatgctaaaaggaaattgtgcctaattaggagtttgtaaggctgttttagcaagagataaattcttataatcgcaagaaaaaatctgcacctgatttcttactcttcttgccatatagtacctttacatgtttgactgattccaaattaattcccaagacgcataagctttccaattaatctatactactactacaaaganaaaatatatataaaaaatgtcctccgtcccataatatatntgcttttgggtggatgtgacacattctaagacacattctaaagaggatgtgtcacatccaccaaaaaatccctgagtactttcttagtgtttctatattatctaaaaaaaatatgctatttgttaatctgcactatatattaactgcagggtcatcgatcatcattggacaccaattaagcaacagca

SEQ ID NO: 833 - DNA, 2000 bp, Oryza sativa
  misc_feature (1402)..(1402): n = any nucleotide
  misc_feature (1412)..(1412): n = any nucleotide
  misc_feature (1413)..(1413): m = adenine or cytosine
  misc_feature (1416)..(1417): n = any nucleotide
  misc_feature (1425)..(1425): n = any nucleotide
  misc_feature (1427)..(1427): m = adenine or cytosine
  misc_feature (1463)..(1463): n = any nucleotide
  misc_feature (1465)..(1465): n = any nucleotide
  misc_feature (1467)..(1467): n = any nucleotide
  misc_feature (1491)..(1491): n = any nucleotide
  misc_feature (1512)..(1512): n = any nucleotide
  misc_feature (1523)..(1523): k = guanine or thymine
  misc_feature (1524)..(1524): n = any nucleotide
atgtacacacgtacaggtatttggagtgcttagcacgcattcaggaggcaatagcccaatacgccgttaggtaagtactgtacgtatgtacgtagccaatactagctcctctgttgcttgcatgccatgcaaagatcaactccgaatgtagtactcatgttccgctttttcgaggttgtcttgtttgttcttcttcagagcaggtccaataacagactataagccagttgtaaacatattttaagaacataaattagaagagagaaaggcagcgggctacagatttatagccagctgtagcacgaactctaagagacagtgtgtgtatgataggtgggaccaggtattaatagtgtacttccttcgtttcataatataagtcattctaacatttctcacatttatatggaaattagtgaatctagatatatagatgtgggaaatgctagaatgacttacattatgaaacggagggagtagtatgtaactattgtatgaatgagctattagattggctataaatgaattggagctagtagttgactatactattgaacttgctctcatgtggtagtactgtagtagctagtaactgatcaccgattaaattcctattaagtactcccttcatattttaatatatgatatcgttgactttttaaccaacgtttgaccactcgtcttattcaaaaattttatgcaaatataaaaatacttatgtcatgcttaaagaacatttgatgataaatcaagtcacaataaaataaattataattacataaattttttgaataagacgaaaagttaaacgtttgtcaaaaaaattaacagcgtcatatattaaaatacggaggaagtatcaaggactcctctttcgatcagagacaaatggtcatggttttgatatatgtcgctgtcaccagttaaccacttgcaattgcaaagcgagctagcaggtgggggaagtgtggctaattgacaataaatcacgaaaaaaaattaacaagtgacgatcccttgatggtcaagctagcctcgcacaggccgggctatgcatacatgtctcactgatcgatatgggtatggtgtgcatgcgaatgggaggaagaaaaatctatgcgatggggcttgaaaccaaatctccagtcccaaggcctcatcttatattctcgccacctagtataaaaaatcatggtactttgtttaaactattataaaactacaaaatttaaaaccatgtatcacaaaactaaaatgttatcatataattatatatttaagaccaaatatcgtataactaaaattttatcattagcaccactgttatattgaatgttatatttcctggttaaatttacactagatctttagttccgtaatttgtttttactaaatactctcnccgtttcacnmtgnnagtcattntmgtatttatatatatatatatatatagattcattaanantnatatgaatataggaaatgataaantgacttatattgtgaaacggngggagtatgtknttttaatttgtgttgaatctatagtttcataacaaatttgatactaaatctatatttttatggtacatcaattttaatacgtaatttttaccatagtttcttcaaagtagatgttgttttataaatcgtgggaagcggaagcgcatgcagcggccgcttgccgttgttatgaacggatacgatacgtgtaccactttgtgtgtgtataaattgatagcagcgtgcctctcttcttcttcactgtggtcacctgcagtttgccccacagccattccaagcacatattccctgcaccctgctagctaccttgagttgcaattcatccttttggcagtaaagttcttagtaatattacccagttgctacgtagcagctcgctgaagaacaaaggaaccaatcccacctatctgaatccacacataaacagtagattcttgttctcgcttggatagctacagcctacctctgcaggcgct

SEQ ID NO: 834 - DNA, 1999 bp, Oryza sativa; identical to SEQ ID NO: 816

SEQ ID NO: 835 - DNA, 1990 bp, Oryza sativa
gtgtcagaccgcctgtcgccacctaacccacgatctgatcggtctgtgactggtcactgaccggataaacgagcgcgctgcactgcgttacatgcggcgtgacgcgctcgtccaaaccgcaataaatgtggttaggtgagccccgctatgctcacctaccccatatacgcggcgcaaaacccacaaggggtcggggcgcctcggccctcggggccgagacgggagcggtccgacccctcggggagacaaagagaagggcggccgtatcaccctcgggcccgacctccccccgagtgggttaggccacgtgggtgatcgtgtctgcctcaagtctctaagtcatgatactcccggtcccatgtcaccgacacccctaaaaaagcacactatacaacccagacatttatttataatctatggataattgataaaggtaaaaattatataaatacatgaaaaaaaatcatacaatagataataaagaaaattttagaacttatatctactatattatcacacaattctcccgaagcaacgtgcgggatacccatctagtatcgaaacgattgggaaccgtacgtgatatcgtcgtttcgcattgctgtttccaaatcagcttgtactactactacttgtttacagacaggcaccgcatgcgcagtggtgagtagtaccactaaccaccagccaaacgcacgtgcaaatccagaagtcgagaaaaacagcgactctactacaggtcagtacaaatataccagccctgagccaccagctcgcacactcccctcgtttcgtcgtgcacgagccggagcaggagacgaagggtttcagccatggttagcctccgcctccccctcatactcctctccctcctggccatctccttctcatgcagcgccgcgccgccgccggtgtacgacacggagggccacgagctgagcgccgacgggagctactacgtcctcccggctagccccggccacggagggggcctcacgatggcgccccgcgtgctcccctgcccgctcctcgtggcgcaggagacggacgagcgccgcaaggggttccccgtgcgcttcaccccgtggggcggcgccgcggcgccggaggacaggaccatccgcgtctcgaccgacgtccgcatccgcttcaacgccgcgacgatctgcgtgcagtccaccgagtggcatgtcggcgacgagccgctcacgggggcgcggcgcgtggtgacggggccgttgatcgggccgagcccgagcgggcgggagaacgcgttccgcgtggagaagtacggcggtgggtacaagctggtgtcgtgcagggactcgtgccaggacctgggcgtgtcaagggacggcgcgcgggcgtggctgggcgcgagccagccgcctcacgtcgtggtcttcaagaaggccaggccaagcccaccagagtaaacgaggggaggggagggggggggggtcactcatgcgttgcgtggtgcggtggtgcctctgtagcgtgtataggtagtagggtgcgtgcgtgcgtgcgcatgtgctggttgaataatgtgtgaagaggctagcaggtattgctccgtggttctgttctcatggtcgtgtcatgtctgttagtcgtgataactcgtgagcactgagcaagtgagcaggactgcctctggctgtctggcccagccggacttgttaagtccaaatggaatgaacgaattgtgcgggatatggattttcatctttggggatgttcttcgttgctcatctaagtggttattattttttttaaaaaaatattaacaacataatatatgaaatatatcactccacaaatatacaatgccaaattcgacttctattagttacaacaaaaactaaaaggcaaattttgctacaggacatcgcaattgtgtggttttagatcaaggacactgcaaaaacagacttttggggaaagacactccataattgtggatatttaccgatagacatcacgg

SEQ ID NO: 836 - DNA, 1999 bp, Oryza sativa
tgatgatgataatgctgagtgatggggctttattttttatttcacaggaaaagtccagaaattttgatgtttttctggaatgtgtcaagcaggtaataggatagagttagaaatttgactcaaaatttcccccttcctgctgttgacgctgagtgttgatattgcctcaaaatttctgtttcctccgcgtgtggtcaattgttatggttaggaaattttctccgttcatcgagcagttgcaatgataagcagaggtaaattggtttttgatcggttgggagtattggagatcatgtaaaacaacagtagtagagaattcgatcagctcttttgttttttcttgtttccaatatttgctcttttgttttttcttgtttccaacatttcgctgcaaaatacgggcctgtacggattttaaccaaaataaaccttatgatattttggcaatgccaaaattttggcaggatggtaatattgttaaaattttggcaggatgacaatattatcaaaattttggtaggatttcttatgtatttagcaaatctagcaacaaactgaacgtagacatttttttaataacttaaaaaagatggtatggttgaaaatagcatcaaagggctggtttggtttgtgacctaaattggtcttaccaatatttgtcaatgctaaattttgacaagttttggcatgactaattttggcaaggcaaagttgtgtttggattgaaaccaaaatagactaagttaactattgaaatgacatattttcttagacatgccaaaatttggcttcaaaccaaataaacagtaaacactattaaaattatcaaatattgataataccaatttatgcctcaaaccaaaccagcccaaagtaaacacgccttacgtttccttgtcttatcttctggttaaccactagagcgtgcctggtgccttgtgtgcttgtggactaccagtcactcgatgcaaaatacgtttccttgtctatcttctggttaacccctaaagcgtgcctggtgccttgtgtgcttgtggtcttgtggactaccggtcactcgatcaccatctagaaatttcccagtccagtcttgtaacctgccatcaagaatcaggctatgcacttgatttcatgggaaaccttaaacaaaaacagatgatctccagtcttgcaatttgccatcaagaagcaggctatgcactggatttcttgagaaacctcaacaaaaacattaaacatatatactcactaactcacatgctgtccttacatagtagacttgtatcctaacggtgacgtagtacttttgagctgtcctaggatggtactactatctcacatgcttgccgcagcttttttaagttttaaatctgtcgagaaatataggatgcatctgttcgcttttgcggctgctgttttgcagtagaagcgtatcggttcgctgttacagcctaaatgcgaaccgttattggtagtgggccctatacatgtcggaatctatctacggccacgcatctggagtcagtgctgacgagcacacaacacacacaggcagacaagcagaggcaatgcatcagtttacagaagatccattaatcagctataagcaaaacaatggaattgctgatgtttataagcatcaggtactgctgaaaagcaacagcgtctgcaaaacgatggcgccctgtcttgaaacaaaggcatcattagcagagttgtagcaagtgacatgcttgccgcagcgtttaagttttaaatctgttgagaaatctcttgaaacaaaggcatcatttgctgagtatatagtagttagcaaccaagtgacggtgaagaatacatggcattactactagtagactttacacatgtcagtatgtcacgaggctcgtgaccccaggatgtctagtgtgagtcgccccaggtgacccaagtagtgtgccgtcgcgacgacacgaaaattccacgagcccctcgtgaccgctctgccttcgacaacgag

SEQ ID NO: 837 - DNA, 2000 bp, Oryza sativa
  misc_feature (1693)..(1693): n = any nucleotide
caccgccctacttccccggcgacgaggccacaagccagtatagggttgcacggccgtagcacgcccagatcaggacgatacacacgcggcatctacaacaacaacaacaacaaaattacgcgatctttgcgaagaaacagtgggatttcagggtatagatctcacggacttgggggtgcggccgtggaggggaagtatggaatttgtgtgggagaatctcacggcacacggatccatttcggggacgggatttgctacggtttttggcgtgatttcctcgcgttttttcgcatctcagttcgtacgaccccgcgtttgatggctgcacaggaggagggaggagcaggcacggcacgtgcgagatcttatcctggtttgttttatatgcgaggggagaagaaaaaaaaggaaaaaggaaaaaaaaagctgttcgctgctggctgtggccgccgcgaaggaaagaaaaaaaagagaagaaaaagaaaggaaggctgcggctgtggctgtggtagtgtggtggatgtgggcgtcgcgtgcatagcgtggccgcgtgggatcactggacgcgtccagtgcgccgtggttcctcctccaagctgaacgcgtttttttttataattttttttgttttgttttgtttttctttcctttttctttttgtgtgtgttgtataggggcttggaaaggggtaggggtttctggagcgggtgcaaatggagacaagcaatcggtggtggggtggagtcattggactcacgcggttgttgttaggcacggtgcttagcagtttactacataggcatgtattgacttttcccctctctaaaacatccatgtattgatttcttccctatctaaaaaattgatgacaagtaaatcgccatctccttgtgcagtatgcactatgagtttattggataaaaaaatcatatattcaagctggttggcttcagttgataaaccgtagagacataaataagataatataaaataatttgagtcagggttttatgtttctactttaagtgataaaccaagattgaaaaaatgataaaaatatatagaataattttaaaacaacttaaacatttcaaaatttatcaagggcattaagccatgcaattaacgtgattataacatgtcaaaccattttacttagccagtaagcaaatacaaaactttttatgaaacacagtacaaaacacagacactcacaacgtacacacactcactattctaaacgcatacacgtagcatatcttgagattcaagaagtcaccactaaaagactaattagcatctcccgaaaactgaaccgacataacttgaatttgacgaagttatcacgaacatttgaatctgagcgagctatttccaccacaagaaatctagctaaccagttgagatacgcttacttgcttcgtagtcttattcttttttaagagcaaatgcaaacctacgaagtgaacagaatgcatatgacaagccattaggccataagccaaataactaaccacccattctccatccacgttaaaaaaaaaagaaaaaaaacccaagaaaaaaaagtttttaatcggtatcactaaaaagggagaaaaaaaatcagggggaaactggagaggagtggaatccaatgcgggtggcgtccagtgagacgtggtccagtggtccgctccatttctcccccctnccctatcctatatgagcccccgaccctcacccaaaaccctcctcttttcccctttcacaccgtactgccggtttgctagccgcctcgctgctccggctccgcctctccacccatcccgccgccaccgccgccgccgccgcctcatcctcctctctacccgcgccgccgcgcctagctatctctaggaagggaggagaaggggccgggtgcgcgcgcgctcgctcgctcgctcgtctcgccggatctacagccgccgccgccgcctccgggtgttctctgcttgggatctatctcgtgagccaaagcc

SEQ ID NO: 838 - DNA, 2010 bp, Oryza sativa
aaccaatgtcatgcttcctaagaactagaagtataagtattaaggatgccaataatttacctgataagcgctatcaaagaatggcagcaatgcttttgatctcatcaactgcctgatctgttcccactggtccaaagttgggtctactccagtagggttgtgggcacaagcatgaagcagtacaattgcacctgaaggagctgaaccgagatcttctaacagccctgtaacacgaaaacacatccttgatcaagtcagacaggtgcaaacaatcttgcaattaatcttcttcataagaacaagttcctccatggaaaattgaaattggtaccttggaaatccagtccacgggttgcaggatcatagtagcggtaactcctaacagtcaggccagctaaagtgaacactttggggtgattcccccaggttggctgtgggatgtatatagtgcgctggagaacacgtttataatttagcgatcatactttgcattgtaatgtagaaccatatcagtatctatgaaggagccaaggcagattccttacttcatgataatgccttgcaagaaattcacctcccacccttaaagaaccagttcctgacaagcactgaactgtagccaccctattctcttgaatggcaggactgttccaataaatagtataatcagttttgtgaattacctaatacaagaataagccaaaagtagcaaaggatctgaagaagttatcttagtgagataattttactgtttgttacaattggtcaaaggtaacagatgaggaaaccatatgaccatatatattcttgagagcaggaacgcacctgtcagcaccaaaaataagcttagcactcagcttattgaaatcggccagtccagtgatcggcaaatactccttaacacgtgacctagtcaaagcaaataatcacaggtaaaatacaactgggaatatcatcataagtttgctgtaaaaaatagtcaatggttttttcttcctgtaaacccatccaagaaattgtctatacataaaaaaaaatgtatactgtgtacacacacaaagctgcagacctgcagtactcgtaaattaacatactgtgcccctcactaaaaatatatatctaagtggtaataatgggccaaacaaactagtggcagtgtggcactgataaggcaaacccagttggatacccagcgctgcaacaacatcaatcaatcctacacgctagtatataacaaaagcaaagcaaaaaaatgacctgaaatattataaaaacaggtaggtagagcaggaaaggtcactaaaagaccaaaggtcaacaattattttcgtagaataaaataagtcagccggacgattcaaagcaagaatggtgccaaatactaatatattattagtacataacctgcaagcgttcgcaaaaaaagtacataacctgcaagctaggtggagtataccgtattatctacaggttagatctagaggcaagttgaacacggaatctgtacactcagccagcctaaaaaaaattcccaggtccgaaatcatgcggatcatctggttttcaaatcagacttacgggttgttgatcagcatctgctcagcgcgcctgaccacattcagcaccaggggcttcccttcctactccgatcagaccacaaaatcgaagtcaaatccaccaccaatccaatccaaaatacgaaggagcaaaaaatcaatagaaattcccccaaaacaccttacctcggtccggtaggcgccgacgccgagattgaccttcacggggctgggatccttgttgtacgcgaccgtcacctaccacaacaccaacgggagcaccgatcaggtcgagcgaacccaaaaaaccgcgcgatcacggccgaaaccggtgaagacagcgatggggagcgggagtgagattgggagacgagagggggatcttaccccgaggatggggtcctccggcgcctgcgcgaggccagcgaagacggacgacgacgccatggtgggg

SEQ ID NO: 839 - DNA, 2000 bp, Oryza sativa
  misc_feature (1889)..(1889): n = any nucleotide
  misc_feature (1932)..(1932): n = any nucleotide
atcgcatcctctatgggagagccgcttgagagaaccttcttcgtgcagttgatgccgtgggtgggaccccacattggctcgtggccgattgattgcagtcattggttgttcttcgcattttgcgaccacacttggacgagtggttgatttgcaatgcagttacactctgatgataccttctaattcggttcaatgttgccggcggtgatgtgcaatgtgcgcaagttctcattggtagaaccatcaggcgctaatttcatggagtctgtttttaggtttgaactaggactacatgtagcttgcaggattttcactaattgtggatagtgttgtctctatctttaggatggtgatctaattaatcttctttatgtccatcaaattatattatgtaatgcacagtcattcgagtgcctccccactcccttctccctcgcagccgcacgcgcacactgttataaaaccagcccgatatatacctcgaaaaccgaacgtggaagaaacgccatagaagatctaaacatgaaggcgacactgaggcatgatatttgttaacgaggttcagtcaaaacctacatccccagagcactgattacgagcggtcttccccgatccagcatattacagtgtatccgggtattcacgaccctccatcggctaggccgtcggtcagtcgtatccatacctatgctattgtcgtcttgcggttacaaccaagataaaatctgactcttactctagtccaaacacctattacaactccaagtcctaaattgcaaccgactacgtacacatattcgacacaaaactctaacaaactacaccttggcgaatatgccacgtcaacctgaaattatcccttgcgcgaacatccgtgtaccttgacttgggagggatggggcggtggttaggggatgagcggaggaaatcgtcatcggtggcagtgtggatcggtgcgatgggtagaggcgtatgagcaatgggacgacgactttggtggcggcgaagggagcagggttggaaggtgggcggcaaaaggggagccggcgcgcgtgcgacggagcgcgaagagagtggatgcacgaatgggtggttggagcgcgatacaaggattgggcattttggagtgttgatcttgtgggaggatcttaggaaacaacttagctgtttgattgttcaggactcaccaccaaaaatatcggttttctaagtagcagagatttttagatccatgacttgttaaagtgtattattctgatttcaaattacccgatcttacataacattgacatggtatgtcatacacacattcctatcccatttttttcattattattctctatgtttttgtttttttcccctctttttttatttcttacacacgaagaggaaggaagaagagaaaggggagaaaaaggaaaaataaaaggagaaaaagaatggaaaatttccaaatacccctctaaactttaaatagaagtccgtttaacgccttaaactttaaaaccggacatccaaccctctaaattttgtaaaaccgttcttattactcaaggtggttttgaaaaaagaaaaataaaaggagaaaaagaattagcacccacgtgatatatgacacaagaaaatcgtggcaatttagaattggaataaccttcataataagtttaagtaattggaagatgtattttaataagagttcaaatagaagcccgcgttgaaaatgaaaccgtaagacgtgcaaactcaccgaaaacaaatctcatcgtcgtcgtcgtcatcaccatcgtcatcatcatctgatccccccacgaggcccccagtggtcctgcaccttctccatctccccccacaataataacagcagcagcatccacgactcgataattccngcaaagcggaagccaaacccaaacaaaccccaacctgcaaccnaacgcagacgagtcgtccaagcaaccaccacccgcgcccacctctgctctgctctgctctcctcgccg

SEQ ID NO: 840 - DNA, 2000 bp, Oryza sativa
  misc_feature (144)..(147): n = any nucleotide
  misc_feature (150)..(150): n = any nucleotide
  misc_feature (155)..(155): n = any nucleotide
  misc_feature (1565)..(1567): n = any nucleotide
  misc_feature (1634)..(1636): n = any nucleotide
tatatatcaaacatattagagattatatcaaagtttgtgccgttaaatagtctggtatagtaacaattaatcttttcttttataactggtatatactaataacaatctgctgtaaaagtaatgggagactaacatggttgttannnnaanagttnacaatataactcgtgctcgtagcgatgggaggggtgcgatagttttcgtgtccgatatatataagttggacaacggataaattcatagaattattgagagctccatggattgccctaataagttaaagtgaaagtcaaattttaaatttttaaatttaatttttaaagttaattttaagataatttcaatgtggtttattttctacattgacttttaagtcgcactaataacacatatataaaaattgtacatgtaaattaatttttattttctaataaaccattttgacttattaaaaaatataggcaaccgatgagtaccgaaaatactacggtaatttctaaatgtatataacgttaaaaagaagatataaagggagtatataatgtttgtttttctaataacattgatgggtaacaatcgatctcatcttttcgcttatatttatacttatcagctataatttaaagttttcattttaaattgggagttaattttagagttttttcatcgtagtttatttttcagtctttgttttaaatcgctaagaacatgtgtataaaaattttatttataaattattttacgtttgcaaatatattgatttggatttatttcttagaataaggcaaacggtggggctgaatattagtaccatcgacagagcatcatatcccttgcaacacacgcttccagcattcgaaaagcacgatcagcgtgataccttgcgtgagcgagtgtgaaggcagtttcaactttcaacaagtactgtactttcttcgatccagcgggggagagtttccgtttcccttcacggaaaacgcctcccgccccggaatttcgcagggtaaagcgggggtgaaccgccgcgaaagcgtccccggattctagattcttccatgtgggccccccgcgcgacccctaactttatactcctcgtcctccccccacgcggccgcgtccaggtcatcgtcgtcgcctcgcctcgcctcgccttcccccgcgtggcctcgccgtcggatcgagccacgccgccgccgccgccgcgtcgcggatccccacgctcgccgagaggaggaggaggtgatgccgcttcccgcttgcccccaccctctcctctcgtctcgcggttgcttgggtgcttgtatgctgggtttgtgcgattcggatttgggttcggggccggtggtcgattcggagggggcactggccgattcaggcgtagatttggtttgtttgtttatggcgatctgttgtttgctagttgttcatacgcgggttggttttcctagagaattgggattttttttaattgttctgcgattacggtagaaatagatcgggcttatggataatcccgtcttcttctagcgtgtgattttatcctccaacgtgggagatattcctannngttttatttccttgtgttgtttatttatgcttagattgttgattccatccttgtggatcgtcagcannntattctagatgatcctatataattgtgtgaaacaaaattgaggttgttgggagggtttctgatcatcagctgtcctctttaccggcacgaatttggggaatctttcttggttgtgttcttgttggcttataccttttttatgttttgctcaaactcatgagatttttatcgtttaatgctggatccttatgtatgaccacatgctagtagctggcggagcaacttcgtaattgttgctagtagccattatattacatagtactcctaatatattctatcagttttgcatagctatttctagcattgttggtgattgtagtttcattggcaattgcagcttcttgcactttgaagaaacagcaag

SEQ ID NO: 841 - DNA, 1999 bp, Oryza sativa; identical to SEQ ID NO: 816

SEQ ID NO: 842 - DNA, 1999 bp, Oryza sativa
  misc_feature (107)..(107): n = any nucleotide
  misc_feature (110)..(110): n = any nucleotide
aatttcatgtttatactatgatatgaccactgaaaattctgttcatttttggcaggcacgtcgtgagaaaataagtgagcggatgaaaattctccaggatcttgtcnccnggatgcaacaaggtctcaacatattttcctcattttgtcccataagttggggtttaaatattatatttttgtaacatgacctctaaaacatccccagttctgtttctgtaattgattttcattggaaaacttttgcttgcttggccaggttattgggaaagcatcagtacttgatgagataattaattatatccaggctttgcaacggcaagttgaggtatgctgtttcaccattggcgctttatgaaatttctttaccctccatatctcagctaatcgctctataatttgctgttatctgcagtttttgtccatgaagcttgaggctgttaatgctcatgtgaataatggaatcgaagcatttccacccaaagatgtaagtcaagtagtaaaattaacagtttaaatagcatgatcattattacaataaaaggtctcaagatatatttgaaagattctgtggcatactatgcgctactggcactttatcttagctccaatctttgactttgaacactgtgttaatatgttgtttttttcaacaagtcccatactctacaggcaagccagctatatgctactaccatatgttttagtttttgaaggcgttatccattgctcccttctgaaaattattaccattttattgaagctatactcctgaatttcaaaaacgtttaggcagggcaaggcatttaatatctgcagaggatacacatcattgaaacattttcctgatttttactctttatctaaccatggcatttgtctgtttgtttagttcaatgtgtttatgtatttactaagtactagtagctctgtggagctttatgtaaacttccaaatttggtttttagtattaaaattgtttattttcttttgggtcttttggttgcagtttggtgctcaggtatacaacacggctcctggattgacgtttgatccacaaacaccaagagaatacgcccagggatcaacaccatcggaatggctccacatgcagattggtggcacctatgaaagagtgacatgaacagaacaaagtcaggatggtggcccaaaataaagcataccatgagttcagtcagaaaccacggctttagattatttttcgaaactctcgtgctccaaattcgatttcattcatagcatggagctcatgtatttagagactgcgagcacagtatttttacatctgtaccgggatacaattctcatcagattcatgtattccacggaatttcggcaggtcacgctcattcgtagcatgaaagaaaagtaataaccatcaataattctcttgctataaatcctaaagcccttcatttttttttgccatcgtatgcttatctttctgaatcttaccagtagtttgttggtaatttgattactcacatttgctacttcgatcttcgatttgtgtttgtactcccaagtcaaagccatcaatctggcaaattttcacaggatagttccaacaatttgcacaaaattcatctgaactcgttctaagcgaaagaacagggtggatgaatctggagcaaaactgcacaaccagaactgaacctcccgaaaaccccgcaaaccgcacgccacgaatttaccatcctacccctgtatcgcagatgcgtctccgttccgtttcgcagtctgttttgcccccacgcgaaatctccttgttgcccttttcccccttctctcttctcccctctcctcctcctctctctctctctctctctactcctttcctctcctctctccttgccctcctcgcccccaatggttgccgcggccacggcgccacctgcccattccgcggcgagcccttgacccacccctgatctcgcggcggcggccgatccggcacccggcgacgtgtcccggcggcg

SEQ ID NO: 843 - DNA, 2000 bp, Oryza sativa
gttaaaaatgatctagtgatgggggttctgatggcaaaaggatgacttggggcattttggggtgaaggaaggctaggcacaaaccctcttgagaggacagtggtgggttatagctcatgtttaggtttgttctaagggatggtatttatcacacctggacaatacgattttggtaaacctttctagctagatttttggttctagaaagggaataagttgaatgttgtgaggatcattgatgatttggaccacttgtgccgttaactctcctagcgcataaagcttatgtttccctaaatgcaaccgaccagttagatgaagggttgttactatgaattgatatacataacttgtatttgaggtgaacatgttaactcgaacaattacatattgcatggtttctgtgacaaactgtatacatcatcctagtataatgaacaagcttagcacaacttgaatcttgggtcatgttttgccttggttcaaaggtttgcatcatgtcatcaatatgtcatataaagtgtaaaattgtttgtggaatgctagaccttagctattttcttttatattgccagtgaaaatggaaggaaatgctagaggcggtgggcattctgaggcactgaagaactacaatctaggaagaactttaggtattggttcatttggaaaagtgaagattgcagagcataagcttacagggcacagagttgctataaagatcctgaaccgtcgccaaatgagaaatatggaaatggaggagaaaggtaccttccttttataaagagaccactttaatcaatctattatcttctgtgttcatgatcatatgttacctgcttcctatagtggtctgatatgtgaactgtctccaaaattttgagctaatctaatagtcaagacaaaatttgtactgattctaggatacattttgtttgttaagaagaaagttcacttcctgctaatgcttgtgagtgtagtcattcttcctggtaaagaagaaattttatggttttaccttcttcgaatgcttttgagctggaaattctacaatctggaatttcatgcttgccaaatgctaaggcctgacttcattttttcttattgtttcttgtttacagcaaagagagaaatcaagatattgaggttgttcattcatccccatatcattcgcctttatgaggtcatatacactcctacggatatatatgttgtgatggagtactgcaagtttggagaactgtttgattacattgttgagaaaggcaggttgcaggaagatgaggctcgccgaatcttccagcaggtacttgaccttactcatttctttcacttgttaaatgtgctcttttagcatttatttccaacttcaatgcttgcttattttcatcattcaaaacctatggagcataagcatgccattcatattcgtcgtgtggaggttttgtgtgtggtgttcataattaattgactcaggttcacatgtaatcggcttgcttttagcttctaaccttatcattgaattttaaatttgtgggatggagtgatgtactaaatcaaacttttgattaattcctaagtcttcactgtgttggtgtaatcattggcatgtgattttaacctgaaatggagagagggacatacattattttatgggaacttagagtttttcattgctctgattttgttgaatacatatacattatttctcttaatatttagaaggtaaaattttatggaacagattatatctggggttgaatactgccacagaaacatggtggttcatcgtgatctgaagccagaaaacttgctactggattcaaagtataacgtaaagcttgctgactttggtttgagtaatgtcatgcatgatggccattttttaaagacaagctgcgggagtccgaattatgctgctccagaggtattttttttgtatcactgtgagactatatcttcttgctcctttacatgcaatattttttcttattatagtatta

SEQ ID NO: 844 - DNA, 1999 bp, Oryza sativa
  misc_feature (1395)..(1395): n = any nucleotide
  misc_feature (1403)..(1403): n = any nucleotide
  misc_feature (1848)..(1848): n = any nucleotide
  misc_feature (1852)..(1852): n = any nucleotide
  misc_feature (1853)..(1853): r = adenine or guanine
  misc_feature (1865)..(1865): n = any nucleotide
  misc_feature (1866)..(1866): r = adenine or guanine
  misc_feature (1872)..(1873): n = any nucleotide
  misc_feature (1874)..(1874): k = guanine or thymine
  misc_feature (1944)..(1944): n = any nucleotide
  misc_feature (1945)..(1945): m = adenine or cytosine
  misc_feature (1953)..(1953): n = any nucleotide
  misc_feature (1954)..(1954): s = guanine or cytosine
  misc_feature (1958)..(1958): n = any nucleotide
  misc_feature (1959)..(1959): s = guanine or cytosine
gtcgcgcaggccccggcgacggggctggcggcgatctcgttcgccgcgctcgcgtccttcttccgccgcggcggcgggctccggcagctgctgttcctcgacggcgggctccgcgacgacaccgcgttcgtgcggcgcgggtacgcgcgggagctggaccgcgcgttccgcctcctcgccgcgctgctcctcccgtcgctctgcgtcgaggccgcgcacaaggccgtattcttcttcgccaccgtacgcgtcgagccgccgctccccttccccggcgtcggcgtgccgtggcgcgcggtggcgctggtggccacggtggcgtcgtgggtgtaccgcacgggcgtgttcctcctggtgtgcgtgctgttccgcctcacgtgcgagctccagatcctccgcttcgaggggatctaccacatgttcgacgtcgaggcgcgcgccgccgccgccgagatcttcgccgagcaccgccgcatccgcacgcagcttctcgccaccagccaccgctacagggcattcatcctctcctgcctcgtcaccatcaccgtcagccagctcggggccctcgtcgtcgccctctcctccaaggacggcaagagcttcgccaactccggggacctcctggtaacaccacacagccactccgccgccgccgcaggcgtagcaatcacgacacgatgcttataccctcgccgtctcgcaggtcggctcgtcggtgcagctcagcggcttcttcatgtgcctcttcggcgcggcgaggatcacgcacagagcgcaaaggatcgtgtccatcgcgagccagtggcacatgagcatggaggccctggcgcaccacgccaagtcggcgccattgccggcggcgcccagctcgtcggccagcgacgtggacgcgccgcaccaaccggagctcgggacgacgacgacggcggcgtgcgcctacagaagcagacacgccctcggtaacaccagatgaacccccactcgcgccattttttttctgagatttaaattcactcgctcgcgccattttttgtcgttgcagtgacgtacctgtgccacaacagcggcgggatcacactgttcgggttcacgctggacaggggattgctccacaccatcttcgccttcgagatgactctcgtgctatggattctaagcaaagtcctctcttaattaattattagctcgtgttaattgttaaaatttcctcaccagtttgcaagaacgcaattatgcaatgtgtcagtaaatgtttatgagtgtggtatgtttcagcaattggacgatgtacatataatcgtctactccctccgtttcatattataggtcgtttgacttcggtcaaaatcaaattatttcaaatttgatcaagtttgtatagaaaaagtaataatntttttaancccaagataaatatattatgaaaatatgttccattatcatttaattgatctaatttggtgttgtaaatattaatatatttatctataaatttaaattagtttgattttaaccaaagtcaaaacgacttataatctaaaacggagggagtatcattctgaacttctggtgtataaatgtaaaaaaaaagattcagatcatgtggttggattagtaatgtggcaattctgaaattgacaggttgaatttgctaattgaggtagtaagtccaggttagtcgtagctgagagagagagatggttgaatttgctatagttaggcagcaacagcaacggccacagccatggccatggccatgcggccagctagctcgacgccccatctctctctctctctctctctctctctctctctctctctctctctctctctctctctctctctccngcanrcgcgcgcgcgcnragagannkctctctctgaatcagctctcttcccccgcgatctctcctacttttcctctccggagaaagctacgtgcgnmacccccansaccnsgccccgccgtcgtcgaggcgctggcgccggcgggctggac

SEQ ID NO: 845 - DNA, 2000 bp, Oryza sativa
  misc_feature (191)..(191): n = any nucleotide
  misc_feature (222)..(236): n = any nucleotide
aaagtcgcttacatccactgaaacttgatataccctttcttcaacttaatccatggcaggccaaattttttggtggtttcctgacggcagaagctgtgatcagaaagatgaacaagcttctgggtatcccagaagacaccgaggaaggtgctccatcgaataggaacccaccttggatatggtgttgcttnaagtcttaccgtctggacaagaacgatcccnnnnnnnnnnnnnnntatcggatttttggcacagagatcagggattgaataggggagaaagatttggagcaacttggaaattactgtgtacagtggcatttgcttgtggtacagacacgcaaattgactgagttgtaacagctaggtgacagcctttcggttggtgctactacctacaatgttactgtgatgctgttagcatttggtaatgccagatgatttattttagtttaatcaaatgaattatatgtatcacataaaacttttaattgattttattaaaattatcaactggcataaacagaatttcctctctcccaatctggaaccctaatagaacaactctttcaggaatttgaaaagaatactagcagcaattcagtactcttcttaacttaaaatatactacctctgttttatactccctccatccctaaatgtttgacgccgttgacttttttaaacatgtttgaccgttcgtcttattcaaaaaatttaagtaattattaattctttttctatcattcgattaattgttaaatatacttttatgtataatatagttttacatatttcacaaaattttttgaataagacgaatggtcaaacatgttttaaaaagtcaatggcgtcaaacatttagggaatgagggagtattatttaacactttgatttttcttaaagccaaacttttttttatctttgaccaaatttataaaaaatatatattaatattttccacataaataaagaaactatcaaaataaaaatgctataaatgttgctatatttttctataaatttgattaaaattttattaggtatgattttaaaagaatcaaagcgacttataatatgatgaagtggagaaagtagcaatataggttcagattgaacacaacctgaactacgaatttaggtaagggacatattcaaattcttaatgaattcagataggagaaatattcaaattcgtagtgttatatttaggataaagggagtaaataacagtataacttccatagtaatagagaatttttcgtaatctaaggctggaagtaatgtcgaagacaatgaaaaaaaaaaggctaaaagcgatactagtactaactaaatgcccgtgctttgctacggttaaacgaaaatgtattaatgtggtgttcatctttttgctaaagggaatgttcatcttaatctaatttttttgtgtttatccatttagatttgaatctgttttaatactaagaagttcaagtggtaacttgcaaaatttacaatggaagtaggtggggtgacagattcactgccaccatcgttaccttcttttaaactactccctccgtttcaagttataagatgttttaactttcgtcaaagtcaaactgattcaggtttgactaagtttatagaaaaaaaaattcgatccaagataaatttattataaaaatacatttaattattaatttaataaaaactaatttggtaatgtaaatactatatttgtctataaacttagtcaaatttgaaacagtttgactttgactttaaccaaagttttataaactgaaaacaaatatagataaatgcaagtagcgtccacttcacctctcttctttcgacgcggatgcggccgtccactggataactcacggacgtctggggaaataactaaccccccgtgccgcctaaacaacggctaacgtccaccccaatccacgcgacgctatacctcgcggttctcccacttctccttcctcctccataaaccgcgaaagaaa

SEQ ID NO: 846 - DNA, 2000 bp, Oryza sativa
atcatcaccaatgaaaagagacaaaccttgcagaaacaaaaacaagaactcctcatcacttgtactgctgctaaaatacagtaataatactgacccagggatgcgaatcgcgaagacgagcttggagttgagggtctcggcgggggggagcttgcggaccttgaggcgggtcttcatccggacgaagtcgagctccttgttgcggaactccctgacgaagtcctcgggcctcttgatggcgcccttgccgtcgtcgcggcggcgctgcctcttggccgccttccgctcccggttcttgaccgcccagtcctcgttcaccttccgcttcttcagcaccgtctcccgcacgtacggcagctgctgcgtcccctcctccgccatcatcgtcgccgctatctctacgcaagcttcgccctggacgacggcggcggcggcggaacgacgcgagggagaagggtttcggggatcggcggtgtctgggtctcaccgtcttattatggccttttcatctcttactgggccgggctcacgaaagtttaggcccattaatgatgtgtggcccagttgtagtgggcctgttgggctttttcttgctggttggtgtggcccagttgtagtgccggtcaggttgggtcggcggcgatgacacgtacaagaacagtcgtcgtgactcaagacgacgactcactcaaaggcagcggcggcgagccacgcctccgccgctctctcctgctcttcagtcggcgggcgatcgccggcggctcttccggcgaactcgcgagtcgcccccccccacctcccctctagcctgtactaaggaaggtatgtcatgtgaggggtggtctatggtcgccgccgcgccatggccacgagcttttcgtgttgattctagaaggtgcgcttattttctgagtggaatggcgaataagtgcactcggtgatgtcctgtgatttagttgtgcttggaattttgggtgtactgaatactgatgcttatgttcttcttgctgtgtcattcaggcttgtaataatttattggattttgataatttattcgtgcaatatggttcgcggttctgttgatgtggcaatcaaggagatggaggctttatgtatcggacaaaatcaagaaaccaaagtaggtgtgctgcactagtttcatctttggcgtgaattaaattgttttgtgcactaagcaatactgctgaccatgctttgcactaccatgttccataggtgataccgtgataatagatgtgtaacttttgaaaattgggtgccagacaatgatgcgaatgccgtttagaattaacctgttattcagtgtttgcagtgttctcatttattgatattgttagtttggttatgttcatagtttaccttaatatatccttgtaagttgttaccaatggcctgtttgctaatcttttttgttagagatcagaggtaccatttccataccaggagtttgaaagctatatgtatgatttcaatactccacctaatagtaaatgacatttggtttctaggatagctgaacctctcatggcttccatcttttcattggtccttggctcattgcctttctataaatttactttctattaagttaacattattattacttctttggctgcaggaggaagtcggttttgaaacacaggaggcctcattaaaagcaagcaaagttgcagatagcaaaggagctccgtactcaccaccagaaaatgatgatgatgcagaagtggactatccgtctcaagatggagcacaaggtgacaactctgacttgcaagctcttattgctgagttcctcagctagagttgaagcttttgcaattctctttagcacttgctattaaataatctcattccaagttaaaataatctcattgcaaggaacagtaatagctgccaagaagaaaaagaagaaaagcaaagcgaagtaagtttatgttaaattaagccattactgttccttttctttttagaaccatgct

SEQ ID NO: 847 - DNA, 2000 bp, Oryza sativa
  misc_feature (28)..(28): n = any nucleotide
  misc_feature (30)..(30): n = any nucleotide
  misc_feature (34)..(34): n = any nucleotide
  misc_feature (67)..(67): n = any nucleotide
  misc_feature (71)..(71): n = any nucleotide
  misc_feature (75)..(75): n = any nucleotide
  misc_feature (80)..(81): n = any nucleotide
  misc_feature (84)..(84): n = any nucleotide
  misc_feature (86)..(91): n = any nucleotide
  misc_feature (168)..(170): n = any nucleotide
ggcaacaatgattgtttctgcaggcagncntcantctatatagaggattttataaattaaaacatcncctncatntaacnnttntnnnnnntaaaggtatttctccattacctcaaaacaaagtcaaaaccaagtaatgaatataatagtaaaaaatagaaattttannnaatctatatcaaccattcgccttttaactaaggtttgaggatcatgcatgcacaaaaggtatatttttcttatcaatttgattcacttttgtttccagtttatactgcttcacagacttcatttcaatgagaacatactctcaacagattatagcaaaattgagagcacatatgcatttattattaaagttgcatttcagtgtacttgtgtgggctccaatttatgctctcttttcattttgtcttctactccatgtccaagcagttaaatgctacaggcagacccgatgaaaatttttccatagaagtgaatgtgccattattttttggcacacacgaggccattcaagacggaaggctgttgtcaatattcctccaaaaggggcagctgagatctaatatctgctatcaccctgaaaatttgactagtttggaggtactctactggcatgcttgcatgttatccaacagatctttctagagcattgtgatcttgcttggaggtactctgctggcatgaatgtctaattttctctatccttgttttcttgttgtaaaggttcgaaatttgccacttgatgagctggagtttgcttcattacgtgggtttgttcagaaggtaacactgctatataagaacagggtttattatgattttaaatttctcttagctagcccattggcacatttgaatcagtctttttttacatatctgtatctagctctgttttgttgattctactatatcccatgtatttgtaagttgtagttagttgtgatgcttatgtaaaacagttacacatgggtcttttgttgttacaggcagaactccagcttaatttccagaaaagaagaggtcatggtttgctgtcagttatccgcccaaaatttagtggcatgcttggggaatcacttgatatagctgctcgatggagtggtgatgttgtgagttcttcttttcatatattcttttcgtgtttgctttacagtcatgccccatgtctggcacttagtagaatataccgtaagagtgtagttgcaagggtatggtactcactgtcacaatttataagttatttatggcttctagcagactaactttgctccgtctccgtgccatccaaactgccctggtgttgggaagtgctgtgatgaagatgctgggctttaaaacaccttggcaaacacaaaatgggcaagaaagaactccagtaaataccgtcactgttaagatgccagttggtctgtgcagttaatgcccattcattagaaagaaaatttctagatttctaattcaccccatggctagtctgtggcactatgtgcatgtgtggactggagaatagggaggggagaggatagggcaaatgacaggtggacctgatgctaacaaaaaaattaatgaaggcaagggaaataaaggttacggttagaatggtcatgttgaacactttggacaaaaaaaggtgatggtgatggtttgttttccatttttgttctttgctatgacgttttcctatttacctttgtgatggtattttgctacttcggcggcaattttggtggcacagagcaaatttatcctctctagtatctccattgttctcctttatttttgagaaaacagatgtatctccatcgtttgtgtttcccagtagaaaatagaaaataacaatgcgtctgcatgtccatatgttgtttttcctgacattatttatatattctgatttctgagtgagattcttatcttcttttactcatcagacataaaccacctttgtgctcacttgagctattcttttgtattttcttttcaacacccagattact

SEQ ID NO: 848 - DNA, 2005 bp, Oryza sativa
ccctatgtacgctgcggcggatccgtcgacccacatctctatcgagtacgcaacgttccgtcctaatagtggtgtgctcgacgaaaaaaccggcatcatgtatttcagcctctttgatgctgagctcgatgctgtttacgccgcaataagtaaagtttccggtggtagcttgagggcatcattggcccaaggagatcaaatgttagttcaagttgcagaaacagggcattcctctggaaatacatttggtgggccagtggtcgttgaagctgacgcggatttgaatgcaatagctacaatacccaatgccaaagcgtacaacaatggtcttatcagacgtgtgctctccggatccccaggtaagcacgacgtctctgcctacatcttctctcttttcaacgagaacttgaagcctgggccagccacggagggacactttggcctattctacccaaacggccagcaggtgtatgaggtcaactttcaaggtggtagaagtccctgtccaacgaatgcaagctggtgtgtggcgaacccgaatgttgataatgcggcattacagagagcgttggactgggcgtgcaataatggcgcagactgcagcgctatccagctgggcaaagcatgctatgagccgaacaccttagttgcacatgcatcttacgcattcaatgattactaccaacgcaagggccaggctagcggcacgtgcaacttcaatggtgtcgctttcatcgtctacaagccatcaccaagtaagtttttcaaatgtacattcatatatatatatatatatatatatatatatatatatatatatatatatatatatatatatatatatatatattgcgatcatatcctcattatgtgtttattatttgaacttatttggcgagatataggcatctgcgatccgaacccaagttggtgcgttgcgaaagatagtgtcggggaagcacaactacagaatgcactagactacgcgtgcggtagttgtgccgactgcagcgccatacagcgcggtgcacagtgctttaatccggacaccaaagtggctcacgcaacctatgcattcaacgactattaccagacagccggtcgggccagtggctcgtgtgactttgccggtgccgcaaccattgtcacacaacaaccaagtgagttcattctcattttgtaatgtattagattggtacatttcataccactaaaaatgttcattaagaaaaaaatgcacacttttgtttcaagtagtaagtgattttttaaaggataaatagctatcttattggtgtctgttcaatttatgtacagagattggaaactgcctactcccaccaaacaacgcttgatcagaacaaactgtctaggaagaccaaaagctagcctagctagctaccaaaggcagtgaggatgggattaaagaataattccatattcttctacagagaaaataaggattaaactttttgtatttcccgttggaaattttaaataaataaatgtactgtttgctcctgttgaatgaaattccgcagttacttgtttcagaaaaaataaatgtacatcaaactccttcagcaacggaaaacacagcagtgcaaatgtactgatgtgtccaaggcgtttcccttcaacagtgttaagaaattagcaaaatttatcataggatacgcaaaaaaatgtaattggctgggtgacaccgtgaaacgtgacacggttgatggacactaaaaaaaacatgtaactggccgtaggacaccggtcacattattttattattttcggatcaaaagtggtgggatatttttctaaatgcccggattgaccttctctttccttcttttcccctccccactgacttcgtcgggaacgggcacagcggcctcagagacgcggcgaggtcgtcgcgacgtggtgcagcgacactggcggccagggcggtgtactagatcatgcggcggatcgaggccgaggagatccgcctcgacgccgcgacatg

SEQ ID NO: 849 - DNA, 2000 bp, Oryza sativa
tagatcatactcgcatgtcaagttgttgttccaagtttatactattttactgggattcaggtcttcttttagttgtgaatgtagaaatggctagtttttgtagcattctaattgcaatacggaatttgagagtactgttattgttaatgggtatttttgtaaagtctggactttgtaataaatggattagccaaagcttgttttgttttgggctatcatttaacaggcttattgatgagtcttggtgatttctataatatcttgtggaagcgtacataacatagtgtgttaatgcacctttctaatatccgagagaaatcccagttccagaaacactagaacaaaacatggttgctttctactattatttaacattttcatttctaagaaatatcaaaggtgaaaaaagtatacaatgtgtactatcatgtatctttctacatcctttttgtttacaacattattgtatgataagttaaaatttatctgtttcagaatccatccttggaaggactaatttattgagtgtgtaacaaaacaggctggacatttacatatatgactattttgtcaagagaaatttacagacaacagcaaaagccttccaatcagaaggaaatgtctcaacggatccagttggtatgcatctccctgattctttttatggagaatcacctagaaagttgccatggagctattttttttggcttgtgtttgccaccgaattttagtgattggaagttttttttttgacttaattagtgattggaagttgctatggagttatttaatttggcttgtgtttgccacaattttaatgatattacttacttccttgaattaactttcatacagcaattgatgctcctggtggctttctttttgagtggtggtcaatattttgggatatattcatagcacaaacagatcgggaacattctgatgttgcaacgtcatatattgaggtgtgtatctgtgcttttatttatccttttatgattataatttccatctatgacaaatgctactaattagggcctttcattcttccttttctgctacatcacaacatagaaaattctttgttgccttcataaaccatgtataatgtagatagttgaaccattaaaaactcaattttatctacttcataatgtggcatgctagttaaatcatcaaacatttttccagtgaagcctatttggattgctaattgtttgtcttttatttgttagctccagtttagcctgttgataacctctttcaaatttgtcatatgtatttcatctggtgctaagtgtagtctatgaactttatagttgagttgcatacttgatgatgcgtagttttggattgaattaaataataaagcaatgcccaagtgcataaaaaaattgcagaacaatagacaaagaaaaaatggagcacctatcacccattttgtagcatgcctaatgggagcctttgcctactcccttgtgcaccacctacataggcactgcacatgtaatgggcttctgttatgtctgatctacatgatgcattggaaaacctagtaccttattgtgacaaaccgtagcttgtctcatgttgccttgatgtgaattagagtcatgagtatagtgttacgaagagtagtctggcttggtcatggctgaaccgccttgacgtgatattttaggatatttactacaactaatgggtctttgcaggtaaataagcttactatttgaatgatgttactttcgcaataaatgaagtatctttttccatgtgtagtttctgcaggacaagaaaataattgtatcacctccttaattctcgtgtacgagtgtaaaatgacttgcatttggaatatgatgcatttttcacatgaatagataatgctaattaaattgtactttgctaaaatctttcagactcaacaagcaaaagcagagcatcaaaaacaacagcaacaacaatatcatcatcaacaacatcagcatcaacaaatacaa

SEQ ID NO: 850 - DNA, 2000 bp, Oryza sativa
acgtcatacggctggcccccacgcccccgaaaccagcggggcagccacgtccacctgtccctccacgcccctcccgtgccgtcaccccgtcaccgtccccaacccatccaattccatctcaaaacggaaccggaaaatattagatcccaccacctcccccctccctctccacctgccggtcgtcacctcacctcctccctcctcctccttcccgttgcattccgcatccgatcaacgagcacccaaccgccgccctccccccgattcccccccacctcgccggattctctctctctccggaagtaaaaatctcgtggtcgtgggttgtgtctctatgagcggggggcggtcggctgcgcgggagggagaggaggcggaggaggaggaggtggaggagtacggagggggatacgtgaggatgccgcaggagccggagggggaggcggcggctgcgggggcggggtcgttcctccggcttcccgagtcggcgggggcgttcgacgagctgccgcgggcgaggatcgtcggggtgtcgcggcccgacgccggggacatcacgcccatgctgctctcctacaccgtcgaggtccagtacaagcaggtccgcttcctcccccctcctcctgctcgggttttcgttttggggtggggtacgggttgcgcgattcggtggtgaggcggggttggattcggcagcgtccatggtgcttggcattgtagtgttgttgcgtaaattgatgtttgatggtttgtttcgtcgatgcctgcgcgtatttgatttccaattgacttctgaatgtgtttttcccttttttttaatgaaaagaaaaaatactacctgattttgtgcggtttaagatagagtgagcctccaccgctgctagaaaacgaaaagaaaaaaagaagaagaagaagaagaaggggtccctttctgttgtctgtgtagcaactatgtcaatgagtagcttggtggagcttgcacgaaagagtggttggtactttgtttcactgattcggtggggtatgaaactcaggcgacctgatcattaaattttcagtgcaaatgcaggcgaattctttgttttttttttgggggggggatcagatacagtgctgtgcgtgtgactgtgaaatttccatgttattttcacgtgaatttagagttgactacctatgcctatctgtaattcattttttttgggtccaaggaagtgtactgtttgaacttcttgtaatgttaggttccaatttggtggatgcacatgtatgctttgttacatggaaacataaaacccaagtcaaggaataacatgagctgtgcactatcacagcttatgtctagttgatatgttctgtaaaaaaaaactaacaccattagtctgttccctatggattcgtatcctgaacctcttttccataaggaaaatggttttccttttctgtaaaaaaaaatcatatgaaagtggtttattatccaggacatgctattttcatttcacctttttgcattgttgagattttacagttctgtgaaatgcgaattatgaacattttatccttcggtaatgttaactagttcttctatcagtttaggtggcttctatataagaaggcatcacaggttctatatctacattttgcgttgaaaaggcgtgcatttcttgaggaattccatgagaaacaggaacaggtcggttacataatcatcacagttcgttagctgtatttgcatctgtttatcttttcaattgaaatgctgaatgctgtgattggacaccagaaaaatctgttactggaagttttgcagcaccacttttgttgacagtcattttgacattttattgtatgttgtaaacgtattaggaaaaacataattttctctggtttactattttgcatttcattcgccatgaactatcatgccccacttgtttgtggaaacatataatatttgttgcaagcatctctagtatgccattcccaatggtaatattatagcc

SEQ ID NO: 851 - DNA, 1990 bp, Oryza sativa
caactatatcattgtccatataaacccatgccattgaggcctttgcaacaactccttcgaaaacatatcgtttgatccatgggtctagccatgaaacatcttttcctcctccttctgccgcttatcatgatcttcctcccatgcatcgcttgcgatgcaccccaactggtgtatgatgctggaggcgaggagctaagtagcgaacacaaatactacatcttcctggtaaataataggtctggtgggggtgccctctccatcatctatgctggcaatacacattgtgagcattttgtgttccataggaccgatgaggctctctagggcgcaaaagtgagattcacatcattgcacaattcaacagtcagtgatgcagtccgcttgtcgaccgatgtccagattgactttgtggacatcatctggttgtgcaaccgcccctcgacatggtacatctctaatttccaactgaaattgttaccaatgccaccatcatcgtcaacatctaagttgcaatatgtcgtggccaacacaaatatagagcctaactacccatcatcggctaaagtgttccgcattgagaggtacagtgatgatgacaatatgacgtacaagctattgacgtgcattacccatgggaagccttgcaaatatctagggtttcaggtcttcggggataataaattcctagtggcaacggacgagccattagcagttcaaatcgtcaaggaatacacatgatttatgcaagtgcttatgcttatgttatattctagcatgtacttgtagtttatataatgtgcgccatataatctatttgtgatggatcaatcttaagctgttatttcttttgatgtgcgaaatgttgaaactttgtgactcttaagctgttattctatcaatgaataagggagaatagctactttagtccctaaagtttctctataggatcagtttagtccctaaccttttaaatggtccaaaaaaatccttaacctttgtcataaggcctagaatagtccttgggtccaccaaaatcatcatatggatatgccatgtcatcattcatgcaaaatctatgatgaattgtccaatttacccttacgtatatcatagaaaaataaatataagggtgaattagacataaccataggaaaaaaatacttctttttttcacccttttgaggtatatttttgctcttacaaataccatatattttttaaactttttccttttgttttttatttttctgtgcgtaagggtaaattggacaaatcatatagattttgcataggaaggtgacatggcatgtccatgtggcattttggtgggaccaaggactatattagcccacatgacaaatttaaaggacttgtttggacaatataaaagattactgactagaatgacccatgagcgaaactttagggaccatattagctattctcccaatgaataatatctttagaagttctaatttcaattactaatcatgaaaaatatatacaagtatgtcaatgcttttggctgtgaaaaaaatatattaatatattttaaattttggcaagcaaattcatcttttcaaatccaacaacaaacatttgaaagcaatcaaaaggagttaaaggcagcagcggccaagtacaatccactcttcaggtcaggcataatgccaactggtgtgaatgatacaactattgtgcttataccaaagattgatcagccgatggagctccgagacgaggtctgtgtaatgtaatctataaagtggtatcaaaatgcttggtaaatagattgagaccctttctagatgagctggtgtctggtaatcagagtgcttttgtcccaggacgcctgattaccgataatgctttattagcttttgaatgcttccactttattcagaagaacaagaatcagggaaaggctgcctgtgcttacaaactggatttgtcgaaggcttacgaccgcgtggactggcgatttttggag

SEQ ID NO: 852 - DNA, 2000 bp, Oryza sativa
  misc_feature (1548)..(1548): n = any nucleotide
  misc_feature (1565)..(1566): n = any nucleotide
  misc_feature (1570)..(1570): n = any nucleotide
ggttcaggctctagtagaccaatttggtcccacattgcatattttctttagataatggaatagaatcctagcctttacttaaagagttacagccaattattacgccaattcgaccaaacacaaaacgcaacacaacaaaccataaaaacacaagcgtaatagaacaggagcacacgaaaactactaaaagtcaacacaagaaaagaccacaagattattgaattttatttgtgaattttcatccgaagttggcaaaaagatgcataaccattgactcaagattacaacctgcagctttttattagcttgttatctacattacacttttgcagttgagcctaggactggagccaatgtgtttcctaaaaagaacctgcatataaaatatagatggtgatttatcaaaacccaaattatttctactgaactatacagcccaacatatattggatgttcctaaaaaataagtttactggttttttttatcaatccccataagcctattctaaaaaaataagatatactaagtggaatatttaaaccagaagaaaactatagtgctctccaaagaaattttgcttaatgacactccataaataaatgatggatagttttatttttcatgcagaagcaatattttaaactatcatgccaattcctcctagccaagttatcctttattaacacaaccccttttaacaggtgttatataaaaatcttaatcttaagaggcatcctaattttctaaataaactcattcttctcaatgtagccattattaattaaagctaagtacatagaacgaatcgagaattgaccatttttatgaagattccatctaaaatatcattctcctctgtcaaatgaatatgcacaattgaaccacacaaattatgtaagttagtcaggttatgccctactagagctttctaaaaaaaaatattctgtgaaacataacacataatatttgcaaccgaggagtttctgcttcgaactatagcatataaagatgtgtatctatcattgaaggtatagtttcctacccattgcgtattttatcaagcgaaaatttgacttcgtctttttcatcattgagacggggagaaaaaagaagagaaacctagctatctgttcacctatttgttctgtttcgtgttgatacatatgaggacgataggaccacccaacaattaattaactcgactagtataacactaccagatatcccctgtttattaggttaggtgaagatcaaaaaagcagtaggaaaacagtttcgctaccaatcttttgaacaagcatgattgcaaagacccaaatgactcgtagaacagtctacccttgatgttacaaggcagctaaccacccagaatttaagacgacgaaatgcaaagacctgatcgtcgaagacccgaaccatattccattgcttaaacctggtcgtcgcttactcgctttccatgtctcgttgcaattatgttgggtgccgagaaaaaacttgtgcacacatatacacatggcctcctccggttaacgccacaaatcgcnaatgtacgtagcggcanncacnactcaatccatcgcacactagctagaacacaagaaaaatctcagccccgatcgatcgaaatccatggcgttccagttccacacgctactatcagccgtaacaatatggctgggcgtagcggctgctacggcgaggctccatgccgccgtcgccggagcacgagcgccgccgccgccgccgccgcccggcaactgccaaaggaagtgcggcgacgtagacatcccctacccgttcggcgtctggaacggcagcgagtccgacggctgcgccagttccaggctttctacctgcaactgcgaacgtcgacgacaaccacgtctacaggccgttccacgggaatgtggaggttctcagcatctccctgccgaccgggcaggcccgggtgacgaactccatctcctccgcttgctacaacaccagctcccgcgac

SEQ ID NO: 853 - DNA, 1999 bp, Oryza sativa
  misc_feature (148)..(148): m = adenine or cytosine
  misc_feature (914)..(916): n = any nucleotide
  misc_feature (919)..(919): n = any nucleotide
  misc_feature (1209)..(1211): n = any nucleotide
  misc_feature (1215)..(1215): n = any nucleotide
gatgtatgtgatttccaatctgctgcaatatgaatggagactctgtgctaaccatcaacaacatgaaatgcttatgaggcctttgctgagcagccaatcttgcctgtgtttatgtcttcacaggccgaattcctctgttttgtttttmaccctcaatatttggaaacatttatctaggttgtttgtgtccaggcctataaatcatacatgatgttgtcgtattggatgtgaaatgtggtggcgtgttcagtgccttggatttgagtttgatgagagttgcttctgggtcaccactcaccattatcgatgctcctcttcagcataaggtaaaagtcttccctgtttacgttattttacccactatggttgcttgggttggttttttcctgattgcttatgccatggaaagtcatttgatatgttgaacttgaattaactgtagaattgtatacatgttccatttgtgttgtacttccttcttttctattagtagcctcagatgagtgtgaaaaaaacagattatataacttgccctataaatcatttgaaaaaaatattgtacagtgagaaattgatatatagtgaatttttaagagcatgttttcctaaagaagtatatattttctatgtacaaaggccattgaagtaattgtagatacaggataatgtagactttttggacttacactgctacctttaagtaacaatcatgagcaatagtgttgcaatgatatttaggctgcattcgtttactctcttgatttccatgagcacgcttcccaaactgttaaactctgtgttttttgccaaaaaaaaatgtataggaaagttgcttttaaaaaatcatatcaatccattttttaagttatagctaatacttaattaatcatgcgctaataagtcactctgttttnnntantagagagattgttttgaaccagcactcaagaacacagccttaacccagccaaataatgctacaacctaccagtccacacctcttgtaaagcatttgttgcatggaaaagctaagatgacagcaacctgttcaggaaaacaactgacaaggtcatagggagagggagcttttggaaaggtgccgtgcagttcaaacaattagttagcagtagggtgttggtttttgctcacagcaataagaagttaatcatggtgtaggcaacccaaataaaacaccaaaatatgcacaannnagtntgttgtattctgtagtacagacaaaactaaaagtaatgaaagaagatgtggtgttagaaaaggaaacaatatcatgagtaatgtgtgagcattatgggaccacgaaataaaaagaacattttgatgagtcgtgtatcctcgatgagcctcaaaagttctctcaccccggataagaaacccttaagcaatgtgcaaagtttgcattctccactgacataatgcaaaataagatatcatcgatgacatagcaactcatgcatcatatcatgcctctctcaacctattcattcctactcatctacataagtatcttcagctaaatgttagaacataaacccataagtcacgtttgatgagtattaggcgtgacacatgacaaatcacagactcaagcaagataaagcaaaatgatgtgtacataaaactccagagctatatgtcatattgcaaaaagaggagagcttataagacaaggcatgactcacaaaaattcatttgcctttcgtgtcaaaaagaggagggctttacattatccatgtcatattgcaaaagaaagagagaaagaacaacacaatgctgcgtcaattatacatatctgtatgtccatcattattcatccacctttcgtgtaccacacttcatatatcatgagtcacttcatgtctggacattaacaaactctatcttaacatttagatgcaagagcctttatctcactataaatgcacgatgatttctcattgtttctcacaaaaagcattcagttcattagtcctacaacaac

SEQ ID NO: 854 - DNA, 1999 bp, Oryza sativa
  misc_feature (1165)..(1167): n = any nucleotide
agtactggaaacaagctctgctaaggccctctttgtttaggcttaagcttattggactagacttttaagccagctgtggttaatctaggcccattttggaaaaaaaaacattagctgtaatttttctcgaagttatatatttcttgcactaaaaaattaaaaaattagagagataatttgagtttctaagatggattatttcattcatattttaaatagtaaaaacggaacactaaatctctatgattttattcccttcgttcaagtgtaaatgtcagttttaactttagattggcatattttgatcaacaatatttttcaaataatctagcatcaaaattgtatcattatatttgtactaagagctttactaatactctcttgcattcgaatattttggtttgacacgcttagaaataatggtcaaatttcatctacctctaataaaaaacggatgactagtaggagtagcattcagactattcaacgggaatcccatcccgggccaactgatggagtgtgccaccttccggcccagggatggtcaccctgggccggctaacaaggatacggcccagatggatgcgtggacctctggtagactagcagcagtgcggcccatgtacatcgcaggaatcccgtgtgagccgaaaagattgaccaaataagcattatgcttttttttagatgggagtagctatacaactattgatagtttttgggatgaaaaaatttcaaatataactactatataattacattgtaactactatataactactatataactaatatgtaactcgagtgtaactcaaaatagcctgatgggagaactggttaggggaacaaacctccaagttggaggtgttgggtttgatccctacagcacgcgtttgaattttttaagccgttttccctcactagcacaaatctcaaagcatattagacagcttaaaatttgaaagttttcaccccctgttaactgtcgccagttggttccctcactagcacaaatctcaaagcatattagacagcttaaaatttgaaagttttcacctcctgttaactgtcgccagttgtatagcaaatccgttttagaaacataggcattcacaacgccgcgcgcagacacaccatatctatatgatatctatatgagttcctnnnaccactaaaagaataattagctgtaaatgcgagcactcgtgttaaatctaggatttgaactcggatgagctagttccaccacaagaaatctaaacagttaagctacgttcaactacggctgaattgttgtccacttgagagagttctggtcacaacaagtcagcaatcaggatattggcgagaagcctactcttcttcttcttgatgaatgttgccaatgtggtatgtgggcacaatttgcacaaaatgatgcttgtgggcaacaactttagctgcattagcgtcatctaattcagaacaaaacttgaaacttttcattttcctttttttgaaaggatctgaaggctgaatgaagcttgtaagcaaagtggaacacaaagcttagaagcgacttcactgatatgtgggccccttccctactgtaggtcccgcgccacgtcagctctcgacggcgctcctcctccaacttccaagtcgccggagcggcagttgggccagttggcctgggcccacttcaccccaaccgaaagccccccatcaaactgacatgtggggcccacccaaagcctactatctccgcgactaccggactggcagttgggccagttggcccgggcccacttcaccaccacccgaaagccacccatcacactgacatgtgggcccccacgaagtcacgccgcctccgtcttctacctccgcctcgtcgtcacaagtcacaagcacaagaggcgaaagcgcggcgccgtcgcggagaggagaggagggcgacgagggggaggcgattcccaaaccctagctaccctcaccgccgccgccgccagcagcgatg

SEQ ID NO: 855 - DNA, 1999 bp, Oryza sativa
  misc_feature (667)..(667): n = any nucleotide
  misc_feature (689)..(689): y = cytosine or thymine
  misc_feature (1051)..(1051): n = any nucleotide
actgctcttggatattctgtatttgtgtcctgatagtttagaaggacagaatgagctaaatagctaatcttgttaagatgcacatatatttcacataaaaaaggagatatattcgattgctcatgtcttatgcttttacccgtaattagtaaataaagcactgcagatttagttattaagcagaaacttagtggcacggttttcttcttctgctttgttcaaacaaatatagatgtaccaaactgtttgaagtgaacaggcaggggaagctagtaaacagtgctatatgtcaatgaatgtttttatggattatggcagtgatggattaatgagtatctaatgctagagacaaacaatattagcccttattatttttgtgagctcatggtaggctggtagcatatgagttccatcgtttcctgtttttatcattctacctggtgttctgtgatatagcttatcgctaagactatgatgctttaccagcttcaggcatgttttactggtcctaatgttcttctatatgttcatgtgcagagagttgccaccagctccaacaaatctattacctgataagaagtacaacagcctggttagacttctagtttttctgagtattacagtacattttatgatctgtctgactattattggatgtatgcaattngggactaaattgtttttttttyctctaaaaacttgttggttcatgaaacaggtgtctctcagtggccacctctttgataagttccttattaatgaagctctggatattattgaaacagccggaggttcttttcacttgattagatgcgatgttgggcaaagcattgatgatatgtcatactcagagcttgaagtaagaacacatgtttctttttgatgcacagttatttagaattaaaatcaatattatatggcgtctatagtttgggaattaattattgctatttttggaacaatctgctactcattgatggcatgtcaaattcagagcttgaagtaagaaatcattttcttttctatgcacacttattcaggataaaaaacnaaattacatggtgtttctagcttgggaaattaattgttcctgttcctaaaattatcaatctcctgctaccactcattaaaaaaaacaaattttgttactgccaagaaagctaaatagtctgagaactgaaacgttatgtcttttcttatggaaccttcttagcagtaatactgtatggtagctcttgatgatcctatatatttggatttacgaatttaaaagttgatataaagaacaaaaggagcaaatgacagaggttggaattacgtgctgggctcctgttccattcccatggtcccacccatctctatctctgctgcaaaaggcagagggagtatgactagtgcaaaagcagtcagatattttttcgaacggtcaggccgttgccgacgttttatattaagaagaagatatcctattgtaaggagaaaacgggaccaaaccttacaatgctcaattaattagggaaaactgggtgaaaaccacaactacaacaccacaccaacagctaacctaacctaagctaccacgacggagcccaacacaaggcatcggtcaagcttgccatagagacgacacgacaacacacatgttatcgttgccgagcttgtcacccaagtgacacagcagcttcgacttcattgtgatactaccccaacgccaaaatgaacaaacaaaagcgacgcccacgaaggacatcagcccaaaataccaagggaccactcctcctcacagctagcatcaacaatcctataaagacattgcaaagtgccatcattgccaagcttcgtcgcaccccaacaacaaagcagctccgactctacctaacaataaccaaataagagtgatgaacacccgccgtggagcaaagagcgaaaccaagtctgtgaaggcctcgtcaaacaccctaggcttgtagagcttcggagacgttgcaggaatccacca

SEQ ID NO: 856 - DNA, 2000 bp, Oryza sativa
  misc_feature (704)..(704): w = adenine or thymine
  misc_feature (707)..(707): n = any nucleotide
gccgtccggttagtctccgtttagtattgtacaaatttgtcgaaatgaccaaaatacccctgagacaaaaactttcaaaattcggatacaaattctaaaatatcagattttaaatttttggccaaattttggatgtttacaatcttatatttataatatgatattttgttaattttatccaatttttggaagtttttgtcctaggggtattttggtcatttggacaaaattgtacagtgctaacggaggctaaccggacggtgatagtaaatcgtagaagttaagcaaaagtcgatggcatattatagaacatgacaaagccagtggtaaatcgtagaggtgtgacaaagtcagtggcatataatggattctctcatttataaattattactctcctatcagtggcattcttgtcttcttcaagaactagcatggtggcccgcgcaaatcgcgcggctagcatcattatattttctctcatttaataatatatatgttttctcaatgtattattcaaatatattaaaatgacaacataattttaaaattttgtattacctttacgaaactactaatgtataatattcatattgtattttatatacatgttagttattaattatttttaatatcaaattttagttatttgtaaattatattcctatatggactctagactcgtcttttaatatttatttgttttwaanttcgaattttcgttatctataaattgtatttctatatagactctaggcacttcttctaatattatttatttttaattctgactttttcttttttctaattgtatttctatgtggaatctaaactcatctttcaatattctttaatttttaatttcgaatttcagttacttctaaattgtattcttatatttactttagattcttcttccaataattttttaatttctaattttagttatttgtaaattgtacttttatacgaactctaaactctacttttaattttattatgtttattccgaattttagttagttttaaattcttatatggactctatactctacatcgaatattccttatttttaattctaaatttctattatttcttaattgtatttctatataaactatatactctacttctaatattccttatttttaattccgaatttctattatttcttaattgtatttctatatggactctatactctacttctaatatttcttatttttaattacaaatttttattgtttctcaattgtatttctatatggactctagtgtcctcttccaatattccttattttttaattccgaattttctattttttttctcaattgtatttctatatggactatagtgtcatcttccaatattccttattttttaattctgaattttaactatttctaaattgtatttctatatggactcagtttttctttttctccaattaatatgagaatttctaggctatgagagcgaacgtggaggctcttttttctatttctttaataagttaatagatttatctctaattaagttaaaagtgtcatctagcaaattcctaattttttagaatatcttttagtcgtgacatgttttttctatgcttatcagcaaattacacaagttttgggtgtgctgtagcaaaatttaccgatgatctatggtgggctgtggccgcccaaatttattttcacgtttgtaagcccatactgtcacgccggaaataacaattcgtttaatcctaaattgggcttttagcccatgtagaacaggagtactagtacaccacaaagagtcctttatggtaacgatttcgtagaattttgtgatttaggcgaccagaaatcagttaatactcggtttgagatggcgatgaggcgatgagatcattgccttttcggtcgaatctagcagagcggcgagcaacccccacccactttgactccgatcctccccgcccccagcgcgatagcccatccgatcccaaattccggcgag

SEQ ID NO: 857 - DNA, 1966 bp, Oryza sativa
  misc_feature (3)..(20): n = any nucleotide
  misc_feature (50)..(50): n = any nucleotide
  misc_feature (76)..(76): n = any nucleotide
  misc_feature (107)..(200): n = any nucleotide
  misc_feature (1788)..(1788): m = adenine or cytosine
gtnnnnnnnnnnnnnnnnnnttatattggttacatttttagacgtttttnatattggttacatttttgtagacgtnaaatttacttcttccgttacacgatgtgttnnnnnnnnnnnnnnnnnnnnnnnnnnnnnnnnnnnnnnnnnnnnnnnnnnnnnnnnnnnnnnnnnnnnnnnnnnnnnnnnnnnnnnnnnnnnnntaccttatccataaccaacgaagagaattgactttggtatgtactactacctctatcctaaaatataagatcgaacttagtaccaaataagatattttcgcatctggtcttagttttttatattttgagacgggtgggtattagttaaatcagtggattaatcacgtggttctggttagctataacaaaactatcgctaattaaccaaagaccataggcaggcatcatgatctcttaagacttgcagctgctgtccaagattccagaggtacagggcatcaaaaaagtaaaagattccagcggtacagctcttcaagatgtgtatgtgcatggacgaaattaatttatttgcatgggacgtacatatcgctgctcttgtacactcggctaattaaacgacactcaacaagctgtgtagtcggaataaaactatactcttcggaatgatcagttcacttcagcagtactgccggaatattttggtacgtatttcacatgagtgttattgtgtatttgtgttagtggaggttggattagcgaatagagtatatatgacgacgcatcctatgtttaattatttaacgtatgattcgttgaaaatcagaaggcgagaatgttatggctgcgatgccacaagttcagatcaatgaacaccacacacagacaaataattaacttggggagtaggaaaaaactaatgcaaacttgcaaaggacaccttcaggcttcagagagtccatcatgatggcaaaatataaaagggaaaaaacattttcgaactgagtaatttttgagggaaaaggtttaaaattaaacttttgcagtctttctaatttgcctcctcaacttcaaaaccatatatatttataatcccgaactcttaaaaatcagatgaatgacctctctatctggtgatttttagtcttacatgtaaccgattgacagtgtactctacaaacgtatactactttgcaacttataggaacaacataacaacatcacatcacatgcatcacatggactctaaaaataaaccatagaacactatactatgcaactaacattgaaggagccaccacccgagtatttcggacgaccgcccaggttccgccgctgccgtctccattgtcaatagccatcgacacatataaaaattaatcgataataaaaaaacactattagttgtccggacttgatgacgccgctggctccatcaccgacaactaagattcacacttgagaggtaaccgagatacaggtctagctagacacaggcaaccaaacacaccctaacactcactgtcagagtcgccgttggtggtttggtagcatgactctgccatatgacgccgttggtggcccggttaggtggcgccgagagcgcccaagcgagcgagcgagtcgcgcgacgtcgctcgccaaaacaccccgtaaaaccgcgtaacccaagccaaccaacaacccacaaaccaccacgccgcgagccacagcgcgcgcgaccacgtctcggtctctcacgccgtcttcccgcccctcccactataaatcagcaccccgcgcgcactgcttgctcgccatcgctccctamctcgctcctcctcttcctcctccgcgctcgccggagacagccacatcacagcacagagatcgatcgatcgagagagccatcgccgacagctcgacgaacactactgtgtggcatggcggagaggttgctgtgggcgtcgacgatgagcggcggcgagaagaccaggggcatgggcgcc

SEQ ID NO: 858 - DNA, 1999 bp, Oryza sativa
  misc_feature (8)..(8): s = guanine or cytosine
  misc_feature (15)..(15): s = guanine or cytosine
  misc_feature (19)..(35): n = any nucleotide
  misc_feature (37)..(37): y = cytosine or thymine
  misc_feature (44)..(44): m = adenine or cytosine
  misc_feature (76)..(79): n = any nucleotide
  misc_feature (145)..(158): n = any nucleotide
  misc_feature (291)..(291): n = any nucleotide
  misc_feature (319)..(319): m = adenine or cytosine
  misc_feature (320)..(320): n = any nucleotide
  misc_feature (322)..(322): m = adenine or cytosine
  misc_feature (323)..(323): n = any nucleotide
  misc_feature (325)..(326): n = any nucleotide
  misc_feature (363)..(363): n = any nucleotide
  misc_feature (373)..(373): n = any nucleotide
  misc_feature (374)..(374): s = guanine or cytosine
  misc_feature (375)..(375): n = any nucleotide
  misc_feature (382)..(382): k = guanine or thymine
  misc_feature (383)..(383): n = any nucleotide
  misc_feature (385)..(385): n = any nucleotide
  misc_feature (387)..(387): n = any nucleotide
  misc_feature (393)..(393): n = any nucleotide
  misc_feature (403)..(403): k = guanine or thymine
  misc_feature (404)..(404): n = any nucleotide
  misc_feature (417)..(417): n = any nucleotide
  misc_feature (450)..(450): r = adenine or guanine
  misc_feature (451)..(451): n = any nucleotide
  misc_feature (462)..(462): n = any nucleotide
  misc_feature (464)..(526): n = any nucleotide
  misc_feature (528)..(529): n = any nucleotide
  misc_feature (531)..(532): n = any nucleotide
  misc_feature (535)..(535): n = any nucleotide
  misc_feature (537)..(537): n = any nucleotide
  misc_feature (539)..(539): n = any nucleotide
  misc_feature (548)..(549): n = any nucleotide
  misc_feature (555)..(555): n = any nucleotide
  misc_feature (567)..(567): r = adenine or guanine
  misc_feature (568)..(568): n = any nucleotide
  misc_feature (571)..(573): n = any nucleotide
  misc_feature (578)..(578): n = any nucleotide
  misc_feature (584)..(584): n = any nucleotide
  misc_feature (609)..(609): n = any nucleotide
  misc_feature (624)..(624): n = any nucleotide
  misc_feature (645)..(645): n = any nucleotide
  misc_feature (706)..(725): n = any nucleotide
  misc_feature (1534)..(1535): n = any nucleotide
  misc_feature (1546)..(1546): n = any nucleotide
  misc_feature (1803)..(1803): k = guanine or thymine
  misc_feature (1807)..(1807): s = guanine or cytosine
  misc_feature (1831)..(1831): n = any nucleotide
  misc_feature (1833)..(1833): n = any nucleotide
  misc_feature (1881)..(1881): n = any nucleotide
  misc_feature (1908)..(1908): n = any nucleotide
  misc_feature (1912)..(1912): n = any nucleotide
  misc_feature (1918)..(1918): n = any nucleotide
  misc_feature (1947)..(1947): n = any nucleotide
  misc_feature (1962)..(1962): n = any nucleotide
  misc_feature (1970)..(1970): n = any nucleotide
  misc_feature (1998)..(1998): n = any nucleotide
cgttgccsagagtcstgtnnnnnnnnnnnnnnnnntygcgccgmgccgccggacggccagggccgaccgggccggnnnngggcgtatcgctgtgttccttgacgccgtcggcgccgtgggttctgttgcggcccgggggcctcgnnnnnnnnnnnnnngagcgctcggcgggcaggggtgacgcgttcgcggtctgttttggtcagggtcacgacaatgatccttccgcaggttcacctacggaaaccttgttacgacttctccttcctctaaatgataaggttcaatggncttctcgcgacgtcgggggcggcgaacmncmnanntcgccgcgatccgaacacttcaccggaccattcaaancggtaggagnsncgggcgkntngnacaaanggcagggacknattcaacgcgacntgatgactcgcgcttactaggcattcctcgttrnagaccaacaantnnnnnnnnnnnnnnnnnnnnnnnnnnnnnnnnnnnnnnnnnnnnnnnnnnnnnnnnnnnnnnncnntnntgngntncatccagtnnagcgcncttgcggcccarnaannnctaanggcatncacagacctgttattgcctcaaacntccgtggcctaaacngccatagtccctctaagaagntagctgcggagggatggctccgcatagctagttagcaggctgaggtctcgttcgttaacgnnnnnnnnnnnnnnnnnnnntccaccaactaagaacggccatgcaccaccacccatagaatcaagaaagagctctcagtctgtcaatccttgctatgtctggacctggtaagtttccccgtgttgagtcaaattaagccgcaggctccacgcctggtggtgcccttccgtcaattcctttaagtttcagccttgcgaccatactccccccggaacccaaagactttgatttctcataaggtgccggcggagtcctataagcaacatccgccgatccctggtcggcatcgtttatggttgagactaggacggtatctgatcgtcttcgagcccccaactttcgttcttgattaatgaaaacatccttggcaaatgctttcgcagttgttcgtctttcataaatccaagaatttcacctctgactatgaaatacgaatgcccccgactgtccctattaatcattactccgatcccgaaggccaacacaatagaccggaatcctatgatgttatcccatgctaatgtatccagagcgatggcttgctttgagcactctaatttcttcaaagtaacggcgccggaggcacgacccggccagttaaggccaggagcgcatcgccggcagaagggtcgagcaggtcggtgctcgccgtgaggcggaccggccggcccggcccaaggtccaactacgagctttttaactgcaacaacttaaatatacgctattggagctggaattaccgcggctgctggcaccagacttgccctccaatggatcctcgttaagggatttagattgtactcattccaattaccagacactaaagcgnnccggtattgtnatttattgtcactacctccccgtgtcaggattgggtaatttgcgcgcctgctgccttccttggatgtggtagccgtttctcaggctccctctccggaatcgaaccctaattctccgtcacccgtcaccaccatggtaggcccctatcctaccatcgaaagttgatagggcagaaatttgaatgatgcgtcgccggcacgagggccgtgcgatccgtcgagttatcatgaatcatcggatcagcgggcggagcccgcktcasccttttatctaataaatgcgcccntnccggaagtcggggtttgttgcacgtattagctctagaattactacggntatccgagtagcacgtaccatcaaacnaacnataacngatttaatgagccattcgcagtttcacanttcgaattagttcanacttgcanatgcatggcttaatctttgagacaagcnt

SEQ ID NO: 859 - DNA, 1999 bp, Oryza sativa
cgaaatttcatgcaacttgagtctttttttgaggacgaagtttttgcttctaaaatatcggatactccgatttaacataagatagtccgatgtctcggaaagtccgaaattttatggaacttcgttctctgtttctcattgccttggaggtttaaaatatcggactatccgatcttatatcggactatccgacgtgggctgaaagattctcctccaacgatcactttttggggatatataaataccccccacctaacccttttatagggttacctaactcattcattctcattcactttgggttgagcttggtgctaaggtgctttggatctttgagctctttcttcctctctcaaatccctcctcgttctttgtgtggtggatcttggtggttgtggatttggtgttggagggcctagtgtgtgtttcactcgatcttgagcactagagtttgaccaagagttgtgtggtgtttgttactcttggaggttgaggactcctagacggctaggtgtcactccctaaccaccaatctacgtgtggttggccgggagaagtttgtgaaggccggatctcgcctccgcaaggaaagagataccccttagtggaaggaggagtgcttagtgcaacctcttgaggaaagggttagcaaagaccaggctcttagtgagctcctcaacggagagtagaatcccctcaaggatttgaactccgggaacaacttcgtgaacttcatcattggtgatctcccttcatcctccttttagctttgcttaattgtgccgctatagatctagtcgttgtttgtggtttactcttgtttgtgtgatagatctacttgttgtgcttcattagtggattagatagtctgatccaacattagactatctgatattttcggatagtctgactgtggatcagactttccgaccttattttagttttagcttccgcataaagttttaaattagcctattcaccccctctaggcctaattgaccctttcaggatcaaatggcgcatctgcaatattccaatggacggctggaatgagacgggttacggcgacaagagggtctactacctcaaccattgaattcaccaaagccaacgccgccgggaactcgcgctcgctgtgtgctacgtagccgtcaccgggttatagctgttgcaagcggcgtcaccatcctcgttgatgttcgtgccgccgctcgagctcagtgacaccttgggaatatttgaaatacgacttgaaaatatccactgcaccaccgccatctcccttgtcgccaccgcctccccgcatccatcggcaattccgcatcaccgtcgcgaggaggtgcgacctcgtagtccagtgccgcctccttctcctcctcctccacctgcgtcggctccagcccaccatcgccgctctagctagctcccgccggccgccaccactcaggcccccgctcgccgccactccatcccgtgctccccgcggacggctgaagggaagggaaagagaaagaaagagagaaggtaggaagaagaaagagaggataacatgtggggcccgcatgtcagtgggtcccacaattttttttgaatgacaaacgggtcccacatatatgtttttaattcaaatgccacctaagcgtcacgtcaacaccacagattaggtcaacaccgccacatcagcgctatgtcagcgaaaccaccctccaaaaccaccaaaggagtcaaattgtaccggtttcaatagtttaggggtcgagatatccggttttgcggtttaggatcatggattagattcgagtcacttctttctcacagggagtcgaagtggacttattcctaaatactaatcagtaggaaaaccctaagcaccgccaatcctcggttttggcgggctccgttgcccccaaaacccaccaaatcccccatattttccgaatcgaatcccccacatttgccttccgccggcgaggagaggaaagacggggggtcgccggcg

SEQ ID NO: 860 - DNA, 2000 bp, Oryza sativa
cctctacatccaaacgagattctagagcaatagcagctatacagtttgcctaagggctaaatatcttgtattttgcaaatgtcaattgtacatgaactctatctgcaatatctgttcagtgtttcagtgggtcatagacactgtggttatatatcaattacgagttttttttatggtacttgatgaagtactgcaatgttagttcaactctgcactggaaatctgttcattttcagggagttcttgttctatactacctgttttaacaatcataaaataaactgatcagacacacgcagcaaacaaatagagaggactaacacttccattgatgctgctgcacaactgctatgacacaaagttcagagcgaaatctgctgaatggtaagtataactgatagacccaaaggctaaaattatgtcactgatatacttatacgtggatcgtagtaaagtgggacttaaatatcagtgacttaacagcaagctgcacaagccactaaatacgcgcggctttgcaaactttgcaaatgcgcgcgtatttagtgacttattgtcaaaaaaaaatatcacaaaattgagaccaagacacaaactaactactgtactccagtttagagacaaatcaaacccgtaaccataattaccattcccgtgggcgtggacagtggaggtggaagccgcgaaatactagtgaaagacagggtgttgtgcgtaaaaagctcacagtctcacactgtcacacaggattctccctttccgcaggcaggaggagacgctgggactgggtgggtaccctccgccgccggctgccgcggctacctcccctcttccttccctcctctctcgcatccacgcgacagatcaaaccaaccacccccactaatcgaatccctcacccgattgccccgaccacatcgccgccgccgcggccgatccgaccccgcgagcgaggtagggaggcgcccctcatcttcctcttcctcgcccttttttttttttgtttcctgttcatgcggtttctagcggcgcccgcgcgcttaatctctctgcctgatcgggtggagttctaggagtccgcgtgttgtactgacaaactctcagccgtttgctccttgtttaggcatgttgttctaattgttgcgttgcattttgtacgtcctggatgaaaggaaatcgtaggatagttcttgatctgttgttatactattgaccaaatcgtatctaatatcgatcgtctgatgtacctttaaagccatacggtattgtctcgtgttggtatggttggacttggacctgtcgacagcaaaacctttatttctccttgaaatggcaactacgatactgagtaatctttagttccatatctagttgctggattagctgctgtcttttttgtgcttactgcttagagcatttgtaacttgacacaccttggttgctcattgtatcacgtattatactgtatttgtatgtatgtatgaaaactgatatatgatgatggataacgaaatatcatgttagatcacattcttaaacgtgcttttccctttttagttacttctcctctagttaaagcatgttaacgcttctcaacaagatagatttggcggtttagttgttatgtggaagatggaacaccatatttatttttattttgttccttgctgtgataataataaaaaagttctctagttatgctgcttataagtttagtcatggaaaatctcccatttcttgttgaatggaatctctaacacttttcctattgttctaagtacatcattgagatcaggcatgagaaatagtgttatagcatatcatattcgccttcctcatttgctgtatacaagttcaatgcgcattttcttaaaaaattttagttaatcatgaaaatagcttgtattgttaaatttttattgaatagctttacttctaagccacttcttgctcaataatgtttttcttcctctaatgacaacagaaccgaagccaatatg

SEQ ID NO: 861 - DNA, 1320 bp, Oryza sativa
aattaaaagcattactcttttcattagtaatttaacctgcccttaatatcatgtcattgagaaagtttgtatcggttggcaaaaaaaggaaaaggagagggaaaacagtggatgatttgatagaatcatagaagagggcaatggataaattttaaggtaatattataaagcctattacgtaaatattgtttttgacgtaattcaagtgctaagcagtaacaccttatatatctatataaattattatttagatgttatattaaggggctcctattttgataggaacattaatagctcacttcgacggtagaaaatactcaccatactttgtggagaaaatatgaaggaggagaagaaccgttcatcctcacttcattatcttcttaattaaaagtatatagtgtttgtgtatatgcgctgaattcggaagtagattcagaaatgttttccattggttacacctttagacattgtttacaaattgcttgttcaagaaacaaccgaattttattgtagcacacaaggactagtctgctccctgaacagataattggacttggataggggcttctttcctgatgcatcctaaccctaccgcacactgatttactagctagaggttatctttctgcatgaacagaagtcatcactgcagaaactgaattagttcaatgtgagatgaactggtgaggatcagtctttgtgtatggatgtacataaatggatgtggttcaccgcatttcatgggcttcaacagccttcaattagttgatttgatatatgatagcttttcatttggagagtactattggtgaaatggaagagagacagtggagaaaagataattgttgctacatatgacaacagtgagagtcaacttttagcatttatcaaaggaaattttgatgtatggagtgaagaaaagaaaacaagagtgataaaaaaaattatttcggtgcagtaataattaagaggctttgttgtgtcaactattatagaaagatagtttttaagtgatatttattagatatataagagctttcctacatgccttacattaattctgcaagcttggttagtttctaccctgctcaaataattaaatataattaaattataactaaattaatacttcgttgtaaaaaggatgatgtactacagtacagtgtgtaggcaaacactcaaactataaatcataaataaacacaaaatattcaggatttaaatcaccaaatatcaaatccaatataaattaaatgtctcattttgttcatcacaaaatatataaatcaaaaccattgatttcacaggattgagctc

SEQ ID NO: 862 - DNA, 2070 bp, Oryza sativa
  misc_feature (263)..(362): n = any nucleotide
gaaaagttggaagtctgtgtgtctagaaaaatttttgatgtgatggaaaagccggaaatctgaagaaaaattttgttgctaaactcgggcatagtaagcaaaataatcactatcctatgagaaaaatatctgactgtcaaaaagttgtaaaagctaggtgctagatggaagattcaagattctcttgtactgttcgaactgctcatcgtatggtaccatcacgttgttatacatcacatcacactgtcggattattactacgnnnnnnnnnnnnnnnnnnnnnnnnnnnnnnnnnnnnnnnnnnnnnnnnnnnnnnnnnnnnnnnnnnnnnnnnnnnnnnnnnnnnnnnnnnnnnnnnnnnncccgggaggattgggacgccgccggcggggggtacacggtgtccttcaaggtccttggcactcccgggcgggagggcgggttagtgctccgcgcctcggggtccggcgagggcgtcccgctggcgccggccgccggcggcgcctccctcgcggccgagctctccttcgacccgacccgcgcgccgttctacctctcgttcctgctcacggacgcgtcgggggcggagatacggacgcaccgcaagacgagcttccgcgtgcccgtcggcgtcgggccgggcagccccgcgccgctcggcatgtctatctcaggcgacggcgccgtcaatttcgcggtgtacagcaagaatgccaatgccgtttctctctacctctacgccgccgccgtcggcggcggcggcggcgacgagcccgcgctggagatcgacctcgatccgtacatccaccggactggcaacgtctggcatgtctctctggcgagcgtagatgggtacgtcagctatgccttctgctgcggtggcatccgccgcccactgttggacccgtacgccaaggtgatcggagacttcgtctccagcaactcggtttacgacgagggtgtcactgcgccgtcaatgaggtgctttgcatcgttggcgattgcgccgagctacaactggggaagggacaggcacccccgtctgccattggagaagctggtggtgtaccgggcaaatgtggctttgttcacaaaggacaggtcgagcgggctcccggatgacgctgccggcactttcaccgggctttctgctaaggtagagcacttcaggagccttggtgtcaatgcaattttgctggaaccagtgttcccatttcatcaggtgaaaggaccttatttcccgtaccatttcttttcaccgatgaacttgtatagcagcaaaggtttgagtgtttcagccatcaagtccatgaaggatatggtcagggtaatgcatagaaatggaatagaggtcctcttggaggtggtttttacacatactgctgagggagaatcagagtgtcagacgatatcaatgcgtggcattgataattcctcgtattacattgccaatgggatcgcaggatgcaaagcgagcatactgaattgcaaccatccggtgactcagaagctgattttggacagcctccgccattgggtgcttgacttccatgttgatgggttttgcttcatcaatgcccctttccttgtgagaggtcctggtggtgaatatttatctcgacctccccttcttgaggcgataacttttgacccggttctttccatgacaaagatcattgcagatccttggtctccacttgacatatctaacgtgcaattcccattccctcattggaaaagatgggctgaggtgaacacaagattctctattgatgtgcgcaaatttttgaagagagaagcacttattagtgatcttgctacacgcctgtgcggcagtggggacctgttctcaaccagagggcctgcattttcattcaatcatgtatccaggaattcagggctttctcttgttgatctggtgagtttcagcaatgatgatcttctttctgagtcgagctggaattgtggtgaagaaggtccatcagagaacagtgctgtccttcagacaaggctaaggcagatacgcaacttcttatttattctatttgtatcacttggtgttcctgttct

SEQ ID NO: 863 - DNA, 2000 bp, Oryza sativa
atttcaaattagaaacatattacatggttaaccttacatttgaatgaactaaagcaatcttcaaatctttcgcaaagcatcttttactaggataggctaggtgagatatgttgtgacaaacgtgagctggatcgatgctatagtttgtacacacctttctcatataaagagtgataaaactccaaggaaaaacagattagcacttttttggggccatcctaatgcaagcaagcaaggcttatatggcctgtgcttttttgctttaataagccttttagtccccttccctagtctcatgaagttcatggcaccaaacacctcaacaagtggcaaatgatgaaatgatgtaaatgcacaactactttattttgggctggacgtgttggttctcaactgaacctgcaccgctatcagacagtgtacataacgcaatcgctgagcaaaggaaacagaaaggctactgcccagcgccattttatttggccatttctgctgcaaaagctctctttatttgtttctgaatatttgaatgccaatttggcgacaccaatttctagagagtttccgtggtggcaagacaacctggtacttattgtatagtgctttccttttcgagttgattttccatttgcatttgcaaagatttatataacaaatttgagtataaagaatacatcagtgatgaagtggcgtgactggctcaaatcgagctaagagagatcactcgagcaataatgaacagtgaatcagaataatggatacgttactgtccagtacattgctactgatccttgatgcgtgtgttttgtggtgataagtttgagccgtaaaagcagtggtcgaagctaaacaaaacaacaccatcaaaccaattttggagttttatctgggatattatgcgtggtagtggtattcttggatgcctttggtgacataatttgttgttgaccccaactttttttaaggacaaaaatgtttgtgtcaacactagtgttactatgtgcccatgtcatatgtacactgcttaagcggtgagcaccagaaacatacaaccgatgaagcgtacgttgctcacacgagcaaaagtaactttggtgtaaagatatttggctcttctctagtttgttggagcacattacgttgcattttcgacctattataagtcacactaaccattttacattttcatgatctgctcaatttcgtgcacacctcctgtacatgttaatttctctctagtgctaattaacgatgggctctgcacaaactcccctggttttgatacagacaagtccaattttattcccgcttaaaactaacaaagcttgcattttatctataacacgtctaatttcttgtgggcactgcacatattcccctggttttgatacaggcgtatccaaaattcactcacacttaaaagctcaaaaaagctcccattttaatcaccacacgtctaacaaatttcttgttcacatccacagaagaagctatccatgctgtactttacattgcagtattagactttttatactacttttacattacattattagacctttttttaacacaaaaatccacctacccaaccaattttttgccgggctggtcctcctccccccgcatgagccgcccgtgcgatgacgtctcccggtgggtcacaccgtcacacaccgtgctataaataggggggcttggcctctccgccatgagcaccacacttcaccagcttcgctttgcacaaagcctcagtgcctcactgcacttgcaccggtcactaatggctccggctcaatgtgctcgtgtgcagagggtgttccacttcggcaagggcaagagcgagggcaacaaggccatgaaggacctggtaaaaataatcgctgttgatacgagatgatgatgttatgaacttggaattttgattgttttttacactggttttggttggttgggggggggggggggtgtacagctgggagggaagggggcgaacttggcgg

SEQ ID NO: 864 - DNA, 2010 bp, Oryza sativa
gagggcgggaggccgtaccacttaggggaggagagcttccggcactggacgaggacgcggcacgggcggttcagcgtgctggagaggttccccgacgagcaggtggtgggcgccgccgtcggggggtaccgcgtcgccgtgctggaggcggcgccgcgcgcgttcctgcagcccagccactacgacgccgacgaggtgttctacgtcaaggagggcgagggcgtgatcgtgctgctgcgtgaggggaggagggagtcgttctgcgtgagggagggcgacgccatggtcatccccgccggcgccatcgtctactccgccaacacacacagctccaagtggttccgcgtcgtcatgctgctcaaccccgtctccactcccggccacttcgaggttgattgatttcccctctttttttcattccaagttccatggatgcaagcagggcagaacggaaatggattcctctcatttcttgtacagtataacactaaaataataattaaaaaattaacaacatggactaatataaatattactttctctgtttcatgttccaggttataagtcgtttctatttcaagtttaactaagtttataaactgtttctatttcaagtttaacttactttataagtttatagacctatttcaagttagactaagtttatagaaaaaagtagtaattttttcgacctaaaataattttattataaaaatatatttaattattgatttaataaaactaatttgataatataaatattactatatttgtctataaaattggttaaatttgagataatttgattttgacccaagtcaaaaaggcttataatataacagagagagagagagagtatgtcactaaattttgatctctaaagttagggtgtgtttaaagttagggtgtgtttagtttcacactaaaattggaagtttgaagaaaaaagtttatatgagtttatgtgtgtagtaaagttttagaagtttaaagaaaaaagttgaaagtttacgtgtgtagaaaagttttgatgtgatggaaaagttagaaatttaaagaaaaattgaaaactaaacccggccttactaagaaaacaagagccaattaaactaaaaatagttaactacttatatttgttattttttcataagttgtaaaagttgaatttgaattaaactatcttgtaaaaaaacaactttttatgattatttaggtgatgacaggtaaaaaaaatgaggacatattccttcgaaggatgaaaaaatattcccatgcagaagtgtgtaattctgatgtggtttcggtcgcaggaatacttccccgtcggcggcgaccggccggagtcgttcttcagcgcgtttagcgacgacgttctgcaggcggcgttcaacgtacgtcacgtccgtgctgatcaccatggacgacgttctagaacattcttgattgattttcattttgtgtttttggatttcttgtttggattagactcgccgggaagaattggagaaggtgttcgagaggcagcgggagggcggcgagatcacgacggcgccggaggagcagatacgggagctgagcaagtcgtgctcccgcggcggcggcggcggctcgggttctgagtgggaaatcaagccgtccagcctcaccggcaagagtccgtacttctccaacaaccacggcaagctgttcgagctcaccggcgacgagtgccgccacctcaagaagctcgacctgcagatcggcctcgccaacatcacccgcgtaagaagcacactaagccttcgaagctccggccatggcttctctgacatcatgcacgcgagatactaatcatgaactgcgatgtgcatgaatcatggcagggctcgatgattgcgccgaactacaacacccgcgccaccaagctcgccgtcgtcctgcagggcagcggctactttgagatggcgtgcccacacgtgtccggcggcggctcgtcggagcgccgggagcgcgagcgcgagcacgggagga

SEQ ID NO: 865 - DNA, 2010 bp, Oryza sativa
aatattccatttccagggtgaaatgcgaagaacctgctgagaaccagcagcttatgcaagattttccaggctgcagcttgagtgatcctggttctgttgattatcccgtggaatggagcacacaagaaacatcagcaagctcccaagccatcgtcccttttgcagatccaaactcactggcgctggccaatgtgccgctttctaggtcaaagcgaccagattttgggcaaagacggataaggaggcctttcactgttgctgaagtggagttgctggtggaagccgtcgagcaccttggaacaggaaggtttgtggcttcaatgccccagtagttttattcctataggcacgagatcatcaccgcagttcgcgtgtctcatgtggacctcttgatctggttgtctaggtggagggacgtcaaattccgcgcatttgaaaatgttcatcataggacctatgttgatctgaaggtaagcctaaatctatctcgttttttcttcagatctgcctctttctatcaggatcaggatgcactatctgaaaacctgtgaaacaatatttgatgaaccaggacaagtggaagaccctggtgcacacggcgagcatagcgccgcagcaaagaaggggagctccagttccacaggaactcctggaccgtgtgctcgccgcacaggcctactggtcggagcagcaggcaaagctccatggcgatccccctgttcctgaaatctgccctacctgatcctgatgatgattgatggagaaggcaagaatggccctcgtgtacaaatcggtgtaaaaattgttcagaagggattggttggttgacgtttgattgaaatttgtcgacagttgaaaactcacaacttggtccttcctactgttggttcgttaacaggaggaggaagaagaagaagaagaagaagaagaagcttatttgtaaatttcagcagagtttactgtctttgcaaaaatgcaagtcgttttggacaagttgagctggtttttgcatttgcttggacgtgatcctggctgggccgttgtgatgatgaggtgaggcccaagcccatgaaacaagatgggctttgtcatcgtgggaagcagaccttggctgttacggctgctgttgtctttatctaccggcctggccttcttatccaactgcaactaacaccaaccggccagctgccgtcaggcctgacgtcagcacaagcatggaagcagacgaactccacgtttagctccatcagaccatcaccattcggcgcggattctcgattagcatgtgcactcgtatcatcacaattagagcaagttcaatagaatagccaaccgttggctctaaatcatctataactaatataatagtttattcatacaatagttatctataaaaatatactgcaccattaataacaggtcctacctctcatatacatataacgttttagatataacgttttagagttcgtgttgcagctggctataaatctgtagcccgttttcttttttctcttttttttttcttctcggtacgtggttatagcctgtttatagcttgttattgtaactgctcacttacccacgtcgtagtcttaccaggcagagatacgagaatactgtacaatacggtcagacaacaatactgttacacacaagaatgtaggaataccaggcaaaatacggagagcaaaaaaaaaatagtaatccgttacgtgcaagcgacgtgctgctactggactactagtactacctgtgtgaaagaaaaaaagaaagaaagaaaagaaaatctggaagcagtacgaaaggaaataaaaaaaaagtgggcagcttatccggtagtggcgcctacataagcaaagcagaagcaacgttggttgcgtcaagtaatcggcgctttcgcgagagagagcgatacgaacaagagaaaatcttctccagacaccgcggcgggcttccccaccccatcggaaggaagaagacgaccagctcgcgcgctcggatctcagc

SEQ ID NO: 866 - DNA, 2010 bp, Oryza sativa
gtcccgtctgcaaggcagattggcggacctgcctaatttgttgcatttgatccttcctttgttaattgttataccatgtccccttgtaaccacccagttgcgcctcgatattcgtgcactctgtgcgagtaccgatggtcgccttcaaacttaaaatctgaaaaacaacttgggtaaaacttgggttttacaaaagacttggaaaacccgacacctgggtcggcgcttgcgaactaaatgaatttccaaaatcgtggaccggggaatgtaccgggtgtacggtttcccgctctcgcacttaaggaccgattccttggaatttcatccaaacataagacaagtacgactacatgggtggaatgggacacccctggctgagtaactagcttattaggggagccttgatgccgagagacatgtggattcgccggggtggtgtcggggaggacccctgggcttcctggcacagtatggtctgggacctaacctgttgttggtctgggacccctctcgtcggcatatggtaaacctgtgtcggctttcgaaatgccttgtcatgaaagcttggaggtctcccgacgtggctgatccccacgggctgggtgatccgggttagtaatgtcgtgtgggtaaagtgtaccccctctgcagaggttaacaaactgttcgaacaaccgtgcccacggtcatgggcggatgtgaggtgattcctagcgtagtttggtttgactactgcttgtgaaattgctgtgtgaaaaggggttcggtgtttgaaaaatctgcagctgatgggatcagctaggcccgggtggccgtttgaaaagttgttggcccgggtggccgtttgaaaagttgttggcccgggtggccgttgaaaaagctgttggccgggtgccaaccttgtttaaattctaaagactgatacattgcacatactccgaccggacgagacgcactgtctcatccgtgtcgtttgagaagcactcacttagttgtttcagaaaagagttcaaataaaatcaattgcaaaaacaccagcctctccttgaagcctgcattaaacacttatttcccctggcttgctgagtactcccgtactcacccttgctctatataaataatccccctcccagttgctgaagaagatgaagcggatcccactgatgaggagttcttccaggagcaagccggcttcgatgagttttagggtttcggcctagttcccaagtcgcgcctgtgatgtttggtccaagtcctggcttccgtttcccttttgtaatgtagttgtgagctcgggatctgtccgcagcccaacatgactgtacttctactctataataaagagatctctgttgctgtgatattctgtctccctgtgataccagcactgtttcctgggactggtatcgattaacaggttaatttggagcgtcacaggctagttccggtcggtactagttcggggcgtgacattcttccccctccacctggctatgcgcccggtgatacttgtcgaagacggactacatatctgacgtttttgaacgtgctgatgaagcctagagggggggggagggtgaataggctgtccctaaaaattaaaaacaaatcgcagcggtaaaattcaaacataccggaacttcctggtaaggaacaccggaacttccggtctgctaggcccggaacttccggtgttcttaggcaggaacttccgggtaacagaacaaagatgaaattcaaatttcggaataggagactaagccaatcttcacacgatgatgcacaggtattctaagtagaggatagatcacagaaacatccacagaaacatcacagaaagagacaagagcgattttttcccgaagttcggatcttacgatcctactctccgttgaggagctctaaagagctgggtctcaattaaccccttgcctcacttgtgcaaaaaccccagaggaaatccacagccttcaacccaaaacacccctaggcaaatttctagaattgagt

SEQ ID NO: 867 - DNA, 2010 bp, Oryza sativa
caccgggggtagagaaagcaaggcaccctcttcgtcctcctctcacaccttccctcttcacacatcacgcgttgtctcctcctccccttccccttcctcaaaatctcctcaacacgccgccttagcctcagccccagctcctcagccctgcgcatgcttcgatcttggtgaattcagggagctcgtgaggttacaattaaggggaataaacactagtttggcttgctcattcaacactttgcagcagggtccaattgcatctaaattatctgcagtggtcaattctactcattaattcatttatgtccctgcctgaatgaatatcacaaataccatatccatcggtgaaagaaaacatgcggacccaaacaaatataaacaatggcttgaagcgagccggctctcccatacgccacaaagcggctcgatatcctatatctgcaacatcgctacttttaggaatgttcgtaaatatcttatacatgctagtgccaatgggagtatgatggtgtgttggaataggggaaccagccccatgattttgaaattcaacagactaaatttgttgaaactcatgagatataaatgttaccatttctagctcctcaattattaacaagcgaataaagaatccattaataataataataataaccatattataaatcaattatcccctattttaacttaacccgattaacaaatcaacccatatgcttcccactctccatcgactcgacttgaatgctcgtagagcacgcaaccacactgtgtatgaacaaaccaccagcgcgcaaagccgagaagagcccatgggtcggcgatcgagccggctcccccgcccctaacgagccgcggaccggctcggctcggctcggctcgggatccaatcccaccggtgtagaaaaggcaaaggcaccctcgttctcctttcacacctctccccccctcttcttctctctctccacatcacaagtcgccttcctcctccgcccccgaaatcccctcgcgaaccagagaaacctgaggcaccaccatcaccaccaccgcctccgcctccgcctccgcctcctgcgcgcgcggcgaattcgggggaccctcgcgctcgcgtggggtgtgggtggggggagatccgggcgtcgccgtcgccgggggggggggagggtgctcggattcagccagcggcgggtgggggggcccgcctctttcttcttgggggggcgcggaggagaccccgcccgtcctggattccgtggccgcggcgccgattcgggcgcgggagccccagcacggtgagattttcccccgctgccttgctgcactgtgagaattgccgtatctatactgtactagtttgttgttgttgttgttgttgatgatgtggctgctcgctgttgcggaaacagtggaatggatgggggtttgggatggttggggtttgacgagctgggcgggttgaggcgggaggagggtttgcttagggtggaatctgattggccgcgatcggcacgggtgttttggctgtatcctatagcgtgaaaaagataggaaaattactggttgtatcactttttgctgggtcaggtttggatagaattcaatcgtgttttccctccatgtcttttatccgttgaaatggtgccatatgaaatgtcaggattagttataaattctggttgcacactttgtggacgatttctgttatttgagtgggttatttagcgattatgtgtccgcgaatataatctgtactgacgtaagagcagtgaattttttttatcactcatcacagtgtgtttttagctggatgataactgagagttttgttcctgttattctgagttcagcacccgattattcataagtccaaatgatattttgttgcttgtgtatttgtctaaaactgtgcttgtggcgtccagccagtcaattcttgtgagtattacgcatttttagtgctatatttggcctgatatatatactatcttgagtaggtattatggtgatgaa

SEQ ID NO: 868 - DNA, 2010 bp, Oryza sativa
tgttagtgagcaaaccttgccctggggaaaaagtcatacaggtactgtaagtaaacacttgtagaataaaaactaaatactcaagcatattttagcatccaaattgaaagtgatttaaaagaaccttgcgcgatggcattttgcagactttactatttgattgccattatggataatctttttccaattatataactaaggatctttttctttagtcttgctaacattccatataccataattagtttgagcgcacaacatgattccttttaaagttcatgtttatcctgcttctaaaatttggaattataaccaagttattttcgctctagatagttctatcaggtgctctcatacttttacttggagtaaagtgcattggcggtccttaatcttgtagggttgtgtcatataggtccctaaactcccaaaatgcatatccaggtcccagaacttatcaaagtgtatcatctaggtcccaaatcgacacatcccctctaggatcctatgtggcgctgatgtggcatgccacatggacgtgacgtgtccttttcttttttttttattcttttatttttctttttcttttccattttcttctcattcttctttttttcctttcttatgctagagaaaggagaataaaggggaaaaagagaagaaaaaaagaaaaaggaaaaaaattaaatgggtcccatttgtcagtcaaaataataccacgtcatgtccatgtggcatgccacatcaatgccacataggatcctgaaggggttgtggcgatttggaacctagatgatacactataacaagttctgggacttggatatgcattttgagagtttagggacctaaatgacacacccctacaagtttaaggaccgcccgtacactttactattttacttgcgatattgaagaggaaaaacaagcaagtactcacctcttctccaatgagctatccagattctggcacaggttaacaacaatcctcaaattttttttagttacatgcccccctcaacttgcttcagtttcagtaggactctctactggtcaggtttgtcaggacatttcagatagactaagaacagacctatgacaatgttctttgggggaaagaaaaaaactcgcattgtcatttccaagcttttatccatttcaattgagaatccgtgtccaggcaacggcactagaacctccagataatataaaaagaagtacattttccatgccatctacagttaacccccagtaccaagaacagattcgctgttcatcccaaaaaatcccccccccccccccaaaaaaaaaaacaagaagaagaagaagaaagaaacaaagccagaattcttcctataataaaactcgagctaacatctcaaaactaaccgctagttagactatatcaagtcatcaacaaacaaagaggatatggcaagaagagaagagagagaccgtatccgacgagggagccgacgaaggcgccggcggcgaggtccccggcggagcgggcgaggcagacgacgggcgcggcgaggtgcgggggctgcccgccgccgacgccgaggtcgtcgtcctcccactcgcgcccgcgccctcgacctcgcctcgccgccatctctctcctcgctttgctgttttgcttttttgctcttctcctcgactcttcgttatcttgatgattgattcctctccgtcatggggtttatctttgtcgggttgtgggcccggggatgggggctgacgtggagctggcaagtggtccccaatcgattagtttttattttctcataaaaaataaatccaaatacccctataaaattcacttttggacaaaagactcccctcccccccaagtttgatccatctcttcttgctttccacttgccgctagttttcacttgtttttttccaatttctcgtgccttagtgggcaaccgacatggaaaaataatagatttacctcgtgtcatcttttgcaagggtgggttccacctacctcccgcgagc

SEQ ID NO: 869 - DNA, 2010 bp, Oryza sativa
actgcagcaaatacaagtcacaaacccagagtcatgtgcgagctaaattttgataggagtaattaggtttgagtatcatagagatagacaagaattagtcacttggagcaaatgagcctgacatcttgtattcctgtgctgtccatgtttgaatcctgaacttctgattgacaaaccaaagaaaattgtagttccgaagaaatacatcactggtgtcagtaatgtttgtttcgacaggctctcatgaattgccatggtggttgcttggtacttggtaatgaggacctacagttttgtcatagatttccatgagctgtgtgttattttctggttgctcttgtccaggaactcaataataatgtcctgatgcgttgcgctacatttttttagaaaacagtcaactttcattacccagctttgaaaccaaagccaaaagcagcagaacagagcattgctctgcatttacaatctggtttccaaaagtttacctgttgcacctgatgccagagattaacacactgttctctatttctctacttattctagccgtgttgttctacccttatattctttatctctctacttattttccttttatgtcatttgcgctgatgtacaaaatcctcgatttgcaagtcttgcgtgtattcctgaataaaaagaacttttgggagtaaggccgtgtttagttcctttccaatttttttttaagtatacggacacacatttgaagtcttaaacatagactagtaacaaacaaattacagattccgcatgtaaaccgcgagatgaatctattaagcttaattaatccgtcattagcaaatgtttactgtagcaccatattgtcaaattatggtgtaattaggctcaaaagattcgtctcgcaattttccgtcacatcaaatggcgcttagcaaatgcggcggtgccagaattgcctcttcctagcttggttccacggtcacaaaatctagtcagagattaggccttttgctccattctgtgtcctgtaacccgtcctcttcttttattttttagtttttgggtccgttgtacataaactttattcctattaataaaaaatgcgctgcttgcgtattaaaaaaaatctctactaataacctggtcatcacattgacaaaatgacaagtacaaaagcggaataaaatcgagtaaactattcaagcaagccagagaatgaagaaggccttagaaagttcactgttcctccctcaactatagcctcagtttgtttgtcatccctatatcacaatgattttcggcccttaccgttcacaaaaacctcatacgagatgtcatcctgtactgtccatgtttgacttctgaacttctgattgacaaaccaaaggaagaagttgcaagtgagatcgtacggttctcttatggttgctctggtccatgaactcaacaatgtaattagtcaaaaaaaaaaaagaactcaacaatgtccatatccattgctctgcatttgcaattggtttccaaaaaaatacttatttcatttaattgtttaggattcctacaggcactactatagtactacggagtaggagatagacaaaccaatcaaattaattagttttttctcaacagtttgctttaacctattagtagtaggcaacacataaagccttttttattccttcagtatcagggcaggactgtatagcacaatcttggaatatccaaatatctttctctctctctccaagcaaaatcgttgacgtgataaaatctaaaaacattaaataaaacaaccacaaaaaaaaatattttttccttctcatcgaaattatcgccacacacgagaggctttttgtctgtgccatccacgagtcgcacactcgtaagccacgtcgccaccgccgatcaggagtcaacaccccaccaacggccctgatcaggacacgtgtcctgaaaggctaaaaccaacctgcaaaatacccccttcctatataaactcataaaaaacgcttggacatggcg

SEQ ID NO: 870 - DNA, 2010 bp, Oryza sativa
gggttgggtttgttctccattttatacccatgggtatcttattggttcaaaagctatgcccgatgggtaaatgggcatgggtatgggtaatcactacccatgcccgctttgcccgtttacccgcgaaatctaacttacatgtaggctaggagtaaaatccactagaatacataagccacgttctttgttttctacggtttcccttttatttcccttattatttctctcctcttactctatcgccgccagaggagagacacgacaccgaggtggagaatatttgatgttttaagttcgattcgaagttagtagcttgtagactttttgttccactgcttttgttgtggcgggtaaacgggcacgcccgcgggcataaggcgcccgcgggcaatgggcatgggcaaccatccttacccgtcatgtagtaatgggtatacccacgggcacaaataatctcacgggcatgggtatgggtaggcactacctgtgcccgtcacacccgattgccatccctacacacaccctaatttccagaagcaaatataaaatctctcccctctactctcctcaatccaccgatggcagccagtggcaaacgagcaccaactgacggctcccctactccacccaccatgatccactagaggccggcgatatatagctccatggtgcccctcctctctcctcgcagcggcgacgtccaaagaggctgggaacgcggcggcggattgagtaggccgaggtggtggtgaagccaccgagtagcgggggttggggggggaggacgacagctccatggtgcccctcctctctcctcacggtggcagcaaccaattaggaggctagggacacggcggtggcggagccaccaagtggaaggcgacgtgacgagctcggtcgggaggggggggagggagaggacgacgacaagctctgcggcgcatgccagtgcccctcctctcccggcccgcgatgaggagacgaagcccctcctcaaaggacgacgacctcgacaacagcggcgtgtgcgctcggctgccaccatcatcgcctctctcctctcaagcgttgaggaggagcgggattcggcctagagctcgacggcgccgcctggatctagccaaaggtcagcgacagtggctggcaacttgagctccaccatagccaactctctcctttcccgcgcctcagcggtagtcagctcgctggggcccctcccctcccagccgacgacgaggagatggggcttgagggctcggagggcgacggcgacagcagtaatggagctcggtagtggattggcgtcctcctcgtcgtccattgccggctcccctctcttctcctccaaggatggggaggtggggatggtggggattgttgcagcctcgcagtaagattccttgtttttcttagctttttcagctgaggctctcggctctcaagttagtcttgtgttacccacgaagtaatggtctctcaccgccacgatagcatgctatcctacgtggtgagccgtggccatgctccacgtaggaacactgtgaagggccacacgattccaaaaatccaaaagtaactaaattttgatggcattttcatgtgattaaaaaaatagacaacaaacagtcctttccaaatataatcaagagctagcgatcaaagttctggctggaccacacagcatacatgctgcacaagtgcacagtctacactacttgtgcggatctacccactcggccactcctgtctgtagtgctgtagtagatctccaatctcaatcgagaaaaggccatcgagtcggtgagattctttcacatatatagttcgccgtgaaagtctatttatagtaaatccggtgcctatatatacgtcaaatcaaatcaactatcagtgtgtgagctatacacactgacagtgtagtgtgctgctctcctagctagctagagaacgccacacactggactggactggatggaggcgtcgtcgaacaccaacgccatggccggcgtg

SEQ ID NO: 871 - DNA, 2010 bp, Oryza sativa
gccttggtaggtgagcggttgaggatgtagacggctgtcaccaccgcctccctccagaggatggccggcatccccctctgcttgaggagagcccgagccatccccacaaccgtctggttgtggtgctcgacgactccattctgctgcgggctgtacggcacggtgtaatggcgctgaatgccctcatccgcgcagtgcgacgcgaattcaaccaccgtgaattcgccccgttgtcggtgcgcagcacgcgcaacttgcggtcgcactccgcctctgcagtggcctgcgcgcgcctgatggcatccgcagcctctcccttgctgctgaggaccatcacccacatgtagcgggagaggtcgtcgacgagcagcaggaagtaacgtcgtcctcctggtgtggctggtgtcactgggccacacaagtccccgtgcacgagctcgagccgctccttggctcggaagctcgtccgctggggaaaggggagccgcctctgcttcattaccacgcagacatcgcagagctgctccacgtggtcaaggcatggcatgcctcgtaccatctccttggcactgagctgctcgtgccactgccatgcctcgtcgtcccgacaagcggcgaggcaaactggttgtgtgacttgcgcgctgaggatgtagagtcgattagtgcctctggttaccttggcaagaaggcgacgacggcgatcccaaatcctcatgagtccgtcctcgaccaacacgcgtgagccgttctcatccagctgtcccacgctgatgatagagttcctcaacgcggggatgtagtagactccggtgagcagcctgtgctcaccggatttggcggtgaaggtgacggagccaacacccttgatctccatgccggaggcgtccccaaacttgacggagcctcggacgctggagtcgaactcggtgaagaactcccgtcgaccggtcatgtgatgggtggcgccggtgtcgaggtaccacccatcagccttgtcgttgctggagccattgcagagggagacgagtaccttcggctcatcaaggtggaggaaagcccctgaggccggtgccgctggagaaagctcgatgctagagtgtgccaggagcagagccggctcttcctcctccacctgtgcgacgtgggcctggccacgtcgtggctgtcgacagtctttggcccaatggccaagcttgccacagttgcggcaggtgtcgtctcgtgccggcttgtggttgccggcggcgccgccctgggcgcctctgcgagcgccaccctcggcgcgtcttctcgcccaccgcagctggacacctccgcgtgccttgtgcagcttgcggccgcctgtcgagggacaagactcccccttcctcccgtcaccctgagaggcctcccactgctcccgagtgagatggagcttcccgccaatggtgataggccccgagagaggttgtggctcatcaccgtcgacgaccttgaggcgacccaacgcctcctcgatcgacatcgtggagaggtccaacagagactcgatcgagcgagcaatctgcctgtacttctctgggacgcagcggaagagcttctcgatagctctctcctcgtcgtaggtgtcgtcgccgtactgcaccatcttctacaagagagtgttgagacggagggcaaagtcatcaacatcctcacctggcttgaaggccaggttctcccactccttgcggagtgcctgcagtgtggacttgcgggcgcggtcgctgccgatgcgtgccacaacaatggcgtcccaggcctccttggcagtccacttctgggaaagcgagaactgcatctctgggggactgcagcgatgagggcatccagtgcccgccgatcctcgtcgtagtcgacgtcgccgtaccggactgtgtaacatactgaaaatttgctattttctaaatatgcatcatgccgattcttatgtttttaataacttcctaaacctaagaaattataattagagggacctcctaaaactaa

SEQ ID NO: 872 - DNA, 2000 bp, Oryza sativa
tataagttataacgtcctgggaactatagacaatagatatagatcatgctagttatatatactaggtgaaataaaccgagtacatgacatggttagaaaccacagtaacctattagcttctttttagagcacatggaatagccagtatattttcatagggctagcttttctaataaggtggcttgttgtcttgttgagtgattttacctggttcctttttctttatcacaccctgtgcttgatatgcacaatgttcagagccccacaggacacagtgtctgaaaccatttgctcctgagatgtcctacaagtgtatggaagccagtagcgacacgtttctaatgttgaatcggtgatagataaagggttccattatattattgctttgacccaatagtttatttaataattttagctcaactggggaatacaagtcacgtaaccttggatatttaaggaaccaatatattatatattatatatatatatatatatatatatatatatatatatatatatatatatatatatatatacacacacacacacacacatacatacatacatttgccctatgctccctatcatattccggtcgcttctaatcaattggtctgccttgccaggaaccttcggataagtcccaactggcagcattgcaaacgaacaaacttgtcaattagcaactgaacagttgaacagtatttaaattgatggaggatagcacatctccttgagagtaaagaacggcagccagggaatactaggccaccagacagagaatactagggacctaatcaagaggaattttaattctttccctatttgggataattttctagaacatagtttctgcaggaagaaaaaagggttctgagacacatgatacctttgactttgtcttgtcacatatccttctattattgttacctgtgaggcagttgagtccttagctcataaactaagttttgcttgtctaagaccagcctctgaacatagtgatagcctgacagtgatttccatgaaaccgactctgaaccaaccactgcacttgtaaaaagtttgcctttttaccagagactggaggattcatagtagcaaacaaagtagaagcaaggtgaaggtcaccttacctatactttcctcctgattttcagcaggaaaaaaagggcaagaaagactgagagcagcagaagaggaagatgatgatgaccgaggtcgccaatcacagcaaaaggaaccacaatgaaagctacttcaccgggaaagcagcagtcaccagcagctcggaggagtttgggagcatgacatccaagaagccgaggaacacaaacccgagagacgctcccgtctccccgaaggcatgttgctcaagtctaattttcacacgtctttcctgttctttcatttttcttgtgtgttgttctgactgaggtttctttggttgcaaattgcaattgatcaggagaagaaggataagattggtgagagagtggctgcactgcagcagctagtgtcaccatttgggaaggtatttactatacatttctgcacttgcttcctgtcttctctcatctttgtgaatcaaactcatgttataaaacttagaagcctgagctcatctggttatgcaaactctctcgctttgtgcagacggacactgcttctgttcttcaggaggcctcagggtacatcaagtttcttcaccagcagctcgaggtacttgttctcgatcaccgcacactcatttctgtgatctttaagcctgcttacctttcgttttctgtgactcaactgaaacattttgcaggttcttagctccccttacatgcgtgctcctccggtgcctggcgctgcgcctgaggtcagctacagctacctacatccttctacctaagtcatcatatatactctgaaagtttaacgaaaattcgaaatgttaaattttggctagaaaaaggaaaactttgtagtaatctttgtatgtaacaagcatgtca

SEQ ID NO: 873 - DNA, 2000 bp, Oryza sativa
gtaccatatgcacctctttgggcttctattgaatcgagaaattggattgtacatctttttgattttgatacatataaggtgtcctacggataatgcaaatcgaagctatttgatgtctgactcaggcctatatgaccgatcgatcgaaatactccaagactccacctttgtcatatattccatatatcacattagatagatatcatattcatggaatacgattcactttcaagatatcacattagatagatatcatattcatggaatatgattcactttcaagaaatatagtgaaatcgtctttcccattctaaccaaggatatatgtatcaaaatcgctctaatacggtcccgaatatgcaacggatcggcgtttttatttgcatcgctcctattattactaaccaaggggaaaatagataatgagcatgaggtaacaattccatattgatccgaatcaatccgtatgctcccatctttaataggattcccgctaaaagcatacatgtactgtaatgcgcttccccatgggtatctggtaaccacgtatgtaggggtataatcggcaattgtatggaacaaaaatccatcttggctagctattcgggaggacttctccatcggatcagaacatgaattgaagggcatacttagtagatgcagatctaggtactcattcttcctcagatggggaatgggccaagccgatccgttgttggcactgaaagtgcatttgctagtttgaaagaagctgaatccgggtgggattcaaaatgattcttatgtttcgtagcatgcagcgcagactcacttggtaaatagccttccctaaaagaggcaaggtgctcacacatgaaattccctttcttcgtgcactcatttactagatagtcaggaaccttcttttgacttgaccagcttacttgtatagtatagtagtaggcctttgcttctgaacgaccttacgaatggatcaactagaaatgaatcggtgtcataaacgaatttagctaaccgtagtagtaaattgcgtgacaccaagcaatcgatcaaagccaactcaaaagaaagcccatcccttcatccaacgtgaaaatattctcaagaagaagccaaaagaaagagaggtgaaacagagtagagagaatcgggtgcttccagtgattagttatcagaaagcactgttttccagatcggattcgatcacagtcccataagcagtagggaccacgagtgagcatgagcctatttcgtgatcggctagttgctcaaaaaatcgtataaaaatcaagcaagaaaacgtatgcgctttagcaacaaagcgctcatcccttgttctttcgcgctagttgctcaatccgttgcttgcttctcttctgtcttggaaaagtgaggatttcctatctgatccaagggaaggaagagaggtggaaagtgttgctgtgtcaaatcgagattgtgtgggtgttcagtctaccgctcatgttcgacgctatcgaaaatcatgcattggatggatgcccgggcattgagaaggaaggacgctttcagaggcgaaaggccatggggagagagagcgtctgtgatccatggatctccgatcgggaaaccgtatccaagctccgtggctagtctgcgctctttggacttttcaaacttagcgaactgaaacatctgagtagctaaaggaaggaaaatcaaccgagaccccgttagtagcagcgagcgagagcggaacaagggttttcatcaaaagaaatccgaagcggtttcattcgatttgttgtggattggatgatggaaaaaccagcaagcagcaagcgtaggctgtgttgccgtagtgcgccctacggagttgtacaaagtcagcaaccgttttggggcgcaagcataggcaacacaggactgatgacggggtggggcgcgcagtgaactggttttctaaaaagattggaagatccggccaaagaaggtgatagccctgttcattcgttcccatg

SEQ ID NO: 874 - DNA, 2010 bp, Oryza sativa
tgcaccaacaggttatctatgtacgcccatacataacattcacaaacagggctggacaagatttttacataaaacttagtgctgaagatgagccaaaggtgctacatgcacatgactggagggtttcttttatgcactcagaaggaggaactgaaaaattgcaggtatggcgtcactcttaatgataggtctagctacgttacttgtatgaatgaaattttcatgaagccattgttcagaactacacaactgtcattacttgctccagccaaatctttttcttaccatgtaatatatttggtgatagtgttctatatgttctctggatttttaggcaatattttagttagtaggtcttttctacattctgtatgttgtacattttagttagcacactattttgtttatttctcagcttagatttggttatgcaaaccactgttatttgaaaatgtgtggctgtatggtcagtatggagtattatcactttaaaacagaaacaatataaactatgcatggtttactcaaggacagacttgcaatggattgatgcccctgtgtctcccactctctttgatctcaaacttttcattctcattagtttggttatgcaaaacatcatttatgttgaaaagaagactagcatgcaaatatcaagatgagtgcctgcaaaactcaggaaaaaggagggtaattgtcctcttgttaggaacttaggatactatacatgcgctctagtatcaacaagatatcatgacttaccttcattttattttttaaaattattggctgaacaattcaatggcattcattttgcaattacaaactttcttttctgaaggtccggcttgtggatactgactggtgtcagcctctggatatagtaaaagaagacaccattgttatagtaatgagaaagcaggatggtacccagaaatttataaaagctgagatacgtggctatgaggaaggttcaagattcttgattgtatttcgtttggggccatcagatggaccaatcaggtagtaagagattttaatggcttgcataaacatgattcttatttatctaactatgaccctactatcatgtctgcatgcaggattgagaaccggacaagtagtacaactatcagtgctcgacagtctggtttgggagaggattcttggatacaagtgaaaccactttcaaccaaaaaatattcttgggatgacccatatggacatacaacttttgatgttagcatccagcaaggagatgttactttctttcagtgtgttgacctggaaaaccctgatgaatgttccgctggttttagagaacatcacctcaagctcagtatagttgagactgctgatgttaagattttgaagtttgctgattacccaagaagacaagagggagggtacagatctgatctgggtgatcaccaagcctcgccagttatgcaaaatgatacagatacaggtgctggactattggaacttattgttgaacttggagttgttggagtctctttgattgatcataaaccgagagagcttttgtacttacatctgcagaagctttttatttcatacatgactggttacaattctggtaccactagcaggtatagtgacgactacatcaactatgtttgtacttatgcatggttgatgaaaatatttttttttcactaaagcaaagagcatatccatcagttggaaaattctgaaaatacttattgctttgaccttggttgttcattttgtaaaattatttagtccttgaagctgacgttttgacaaaagatgtggtaaagacagattcatagctctagtgatctagtcataccagagcagctgttttgtagccgtcaatctgaataatggttaaatggttaagaatgagcatagcttggaaacaagtctcttagctcctttgtcttatgctattgttgtatgcaccattgagttttttctgatgatatataatatttcaggtttaagttaattattggccatatg

SEQ ID NO: 875 - DNA, 2000 bp, Oryza sativa
agagtttgaactctcttgctctccagctctttgtaactccttcatacacagatccaccagaacacaggagtagggtattacgcttctcagcggcccgaacctgtctacatcgcccgtgtcttgcgctgtcacgcccggaatttctatccaaaattccaaacgcttacatgtgtgtgaaccctcgtctaggaatcagccgaggcacacaataacaaattgataatagagtacaattattactctaattaataagcgaataaaatgtcattacagaggtagatagttcctctcaatcaataaagatctaagcagcggaaagaaagataaacggcgcagacgactccattccacaggcagcttgaccagggctacacctaatcctccacaccatcggcatcactgtagaactcttcctctgatgaatgattgcaaggtgagtatatgacatactcagcaagtcacgcagcaaatatgcaagtgcacaggataacaaaggatggcataatagggttccatttgcataaacagcctttaataaacatttcagaatttaataaaacagttaagtaataattaaacaaaattaatccaacgctatacaacataccctgttgtataggcccaaccattctgaacaaccatcccggctgcacagtcctatctccaaaccaggaatataccattccaaaccaggagctaatcaaattattaccaattatagcatcttttattatgatgagaggtgtgagactaatcacgaaagacattgttagacccgcccataaccgcgggcacggctattcgaatagttttactccgatcagaggtgtaccactgtacccacaagacacaaccccacatcatgtcaccatgtgcctcaataccaccacggtatctcggaaaggagttgtgacaataccccttgcacaacacaatccattacagcgcacctttcctggatcataatcacccccttataaacaaggcatggactccctagcgacccccgtgggcttatctccgccacttctcagtctggtgctccgcaatgaaccatgctatacaaaaggtaaagccgttgcccacgctggcttgtggttggcacggttaatgtttcacaaccgaaactcgtgaaccggtccttaattgtcatgagcacgaccatcaaaaccatatgctcacaacccaccattatcaggttttagttggcacattaattaattaaccaatcacgattgaccaacgtgaactatcattaagccatcattaaataatagtaaatcttaagttatcccaatagtgtgctaatgtttctaagcagggctaagcaattatatctaatatctagctgaaccaatatataaagctcaactagtcaagttataataacccaaggtatcaaggaataaagtaatcaagaacaaaagggctttagcaaacaataggttaattccacccaatgacattcgaaaataaatgcaatagttgaatagaaacgatagctttaaacgggatcaacatgctcaaagggttgtttgggatctgtgtgacttgccttgctggccttggaactcttcaaactcttctcctgcgaaaacggactctccggaaacgacggaatctaagcagaaaagagcaaaatcaccaaaacagcacaaaaacaagcatgaacagtacatgtggatatttttaacatgtagatctcaaatttagaaaaatttaaagacttgaaccaactaaatccgagctaagatgaattagttatgaatttttaaagatttaatcggattaaaacacttatatagattttaatggaattatgacgcaataatgaattatttttgaaaaggaaaaagggatttattgcgtcagcggctagggtttcgcggtggaccgggcgcacggcgacggttcacgggaacggacggccgagatcgatccatccaaaacggacgaccgagatcgatcggtccacgaccggctcacgggagagggcgacg

SEQ ID NO: 876 - DNA, 2000 bp, Oryza sativa
ttagtgagacatatatctagaatatgtaatttggatttaccaaaataacatgattattttttttcatatacatcttcaatgaagacaagccaagaaaaattaattggttgaagtgacttcttattgactttgcaaagtaaaaaaggaaccaccttatcttgtccggaggagtaatgaatatgcttgcttcacaaaattcagtttccatactttgatatcataagaaacagatcatttgcttttcctactgttattcatgtgtttactgtgattccaattcatcctaattaatctttgaggatattgcaaaaatcatagctatcaaacgacaatggaatgtgttgtaactttagaaacttcattattatataattggtttcttctttaggtcaactgcactttttgtttgcagtcagggtcaactgcacgatgggcttgaggtagctgttaaaagatgttttgagttaccttgttcacgtaatcaaatggatttccaagatttggagttccaaaatgagatttgcttccttgggaagcttcagcacaccaatgtagttaagcttctgggatactgtattcagggaacagagaggattttggtctatgagtatatgctgattggaagcgttgataccttcatctttggcatgtgttcagtattacttcacctcaattttggatcaaaagttctgtgcagactatgcttagttaatgatctcatttgtgtttccattttataggtgcaagaacaagaaggttgcatctggactggtctacacgctctcggataattgatgggatagctgagggactgctttatctccataagcactgcggactacatattgtacatggagatctgaagccaagcaacattcttctggactccaacatgaatcccaagatctccgattttagcctggctagaaggtatagtccaggtgtagatgaagagtacgccgatcgcatactggggtcaatgtaagaacttatcagatcaatatcacaatttttgatatcccagcgggctcttttatccttcttattgtttaagctcttaatttttgtttccacattttagtggttttattgctcccgaatgtcgggaaagacgacttttctcaacgaagtctgatgtgtatggctttggagcattggttctcgagatcattagtggaaagcgatgcttttcacttgtgagtggagattctggagacgactatcgatttctgaacaagagggtgtgtagaatttttgaaatttgtctcgaattttgaatattaatggtgcccctgtcatcatttattaacttgcacaaccaagtgctaatttaatggccaatctatatgagaatttttgtttttcttacccacttcctcagtcatggcacttatggagaacaggaagattgatcaagcttgtcgattcgccctcaggtgatgaattggagacgagagagatactaagatgcattcacatagcactgctgtgtgtggaggagaaccctgccaaccggcccaccatgcaggaggttgttctgatgttaagctgccagactgctctgctgcctaaacctcgttgtccagcttacctaagggcggaaattgtgtcgacacatccatagcagtatagcacagcttttaccacaatgacaacttatggagcttaggattcatgtgcatgtagtattgtttttccagcagtaacctttttgatgaggatgtcaaattcttgagcttttgcctacaaacacaaatggataaaacatggaaggagtccatatttttggaagcttcttcaagatcgtgtttgctttccctatggggattgaggcccctgttctatcactctgaatttgatgaacagatctgcattccatctttaccacctttgtattatgtaggagtatatgccaataggtgaacagtgtaccataatgttttaccagcatggtagaagcataagcatgcatggatgttcacacttttcgtatggaacaa

SEQ ID NO: 877 - DNA, 2010 bp, Oryza sativa
tttagtggaattttcagagcacaaataataattgaaaagaaaggaacaaagttaaaaaggtttataaaaagaaaaatcctaaaaagttctctttccccccccccttcctttcttgggccggctcggcccacttctttccctctctctctcctcccctccggcccatcggctcccccgcgcgcgcgcgccgctgacaggcgggcccgcccgccaccctcgctgacgggtggggcccacctgtcatctccctcctcgcgccgcgcccgccgccgcccgtgccctagcgccgccgccgccgccgaatccgccgcatcccgccttccccgcgcgccataaagaggggcgaattactccccgcgattccctctcccgtttcccccgcttttccctctctctctccctcggattcgtccgatttgaatcccgcaatctccgccggcgcatctatggagcccgagaactccgcggccggtttcctttctctccggccgccctctctccctcccgacgctataaaatcgtcccccgtgctccgctcttccgtttccgccgctcgccgctcactctccccgtcggaatcgagctcgcgccgtgctcctctctctccgccgtcgccgccgagctccgtttcgccgccgtcgtcgctccggtcctcctcccgactcggcgccacctccatcggcttcgccgcgttgtcgccgaccccgtccgccccttcgcttcgctcgccgaccgccggagcaccgtcgtcatcgtcatcccgaaccgcgccgccgccttcttccgcttcggccgccgttcccgtcgtcgccgtcgaccggggtgagccgaagaccgttccattcgcttcccccttccctcctctctctcgggtgccgctccgccgcgccggtggtcgccggcggtgaccatcggggcgcgggcgcgtccccctcccgtcggccgtgccggcgaggccgccttcgggcgtgccctcgcggctgccaagtgggcccggccgtcagccgcccgcgcccgcgggtgcggctgacgcgtgggacccacggcgccggccgccgccagccgcgtgctcccggtccaccgtggaccgagaggctgacgcgtgggccccacttcccgtggacccggtccgcgcgcccctctcccggctgacgcaataaatgagatttttaattaaaatttaaatgaagaaattcgtaaatatccatttaaagagcatataaacttcaaatggccatatcttggccatttgaactcggaattggaccgttcaagtctctaatttttccttaagaagtcaagaacccatttttgtgctttgtttctgctgttatgtggagtttagtagtgtaaaagccttttcttttccgttggtcgtgtagacgctgcagcttcggaagatccgctcttcgtggaagtcgaagccgtcggttgggaaagcgagcaaggcaagtcacatcatctttgaacatattgaatcccagtttgtaaaattatgttgatttaaattattgcattatcgctttatttaaattcccgcgttatcactgttttatttagccatgcctatttacctttgttatgaccatattattattgttattgttattattattaccttgttcaccctagagtaaacaaaacctcaactagtggacactctactcgtggtatccctagtttaaatttaggtagatgcttcgcaatttaattaggtaacattaggtggttttataactttagacttggggaatattcatatcacctggacactatggaattgttggattattgtggaattggcttcacaccgccccctctattcaaaatcccctaaattggttttaggctgggctcggggtgcatggttttgatggtagcacctcggccatataaggaccggtcttcgggcctctgttgcaaagcactaccgtacttccacatgtctagtgggtaaggcttagtttgtggctcagtctagtcataaacaaaagtacacggattggagat

SEQ ID NO: 878 - DNA, 2000 bp, Oryza sativa
ccaggaagcccaggggtcctccccgacaccaccccggcgaatccacatgtctctcggcatcaaggctcccctgataagctagttactcagccaggggtgtcccattccacccatgtggtcgtacttgtcttatgtttggatgaaattccaaggaatcggtccttaagtgcgagagcgggaaaccgtacacccggtacgttccccggtccgcggttttggaaattcatttagttcgcaagcaccgacccaggtgtcgggttttccaagtcttttgtaaaactccagttttacccaagttgtttctaagattttaagtttgaaggcgaccgtcgatactcgcacagagtgcacgaatatcgaggtgcaactgggtggttacaaggggacatggtataataattaacaaaggaaggatcaaatgcaacaaattaggtaggtctgccaatctgccttgcagacgggacaacagattaagtgtgatcctattaatgcataatatttcgcaagcaatataattaaatttcaaatataggctcaagatgttcaaaggtggcttgccttgcttgagatctggagcttgatcctcgaaatcctcgcactgcgggtcttcgggctctgaaactacacgcaaaacgggacaactcaacaaacggcgaaaataaagccctattaaaggcctctaagcgtgccattagatagatctcgagatttggggaattttggaagttgaacggagtcaaacggattcacggttgggaagatattgaatttctaagattattgaatttttgatctaaaggaaaaggatttaattaaatcctttttggaaaagaaaaagaaaagaagggagggagggaatatagacttttctcggacggctagggcgcggcccaagagaaatggagcggtccggccgagctaaatgggccggctggcccaaggcggcccaaactcgcgcgcgcgggagggaggagagagagagccggtggaccgggttcaccacgcgcggtcccgggtgggacccgcttgtcagtggctcagctcaccgtgcggagggagcacgcgacgcacgcgcgcgggcggggaagggacgcggtgcatgcgcgcggtccgcggtggacgcaggtacggcggggccacgcgcagcctcacggctcgcggtggatcgcgcgcacgcggagggaccgaccggggtcggcccgacccggtctggctaagctggcgccgacgtggcgcctacgtggcggccacgtgggctggcgggaggtagacgacgacccggccgcgaatggacggcgggcggcggcggcgagcggcggagcgaaccacggcgatacgggcaaaagcgtgcacaccgggcggttgcacgtgacaaggggaggcgagccaacggctcggattcgccagaggttgctcgacggcggcggattgcggcagcgacaaccggcggcgggagaagagggaaacggcgacgaggtcacgagaggtcgattcccggcggtgagagcatctatgcggcttcgggactcgacgctagcatcggattgggcggaactacgccgagcgaggccggcgacgagcgggtgctacggagctcgggcggcgacggcggcgagcacacggcgatcgacggcaacggtcggggcggcgccggctaactacggggagtctacttaagctactaccgaaagctagggggaggagatggagcgaggaggaagaacggagagagccactaccgtgcgggacggggcgcagtgacgagaggccgacggcgcgggagtgatctctccggcctcgggccagggaagaggaggaagacgagcgcccggagtccccttccgcgtcctagtgcgcaccggctcctccggcacacacgcgacggctgcggtcggcgagagggacggcaatggcgcgggcgagaaacagggaagaatgggagaaaagggaagggagggcgcctgggtttatagggggcggcaatgtcggtttggaaaccg

SEQ ID NO: 879 - DNA, 2000 bp, Oryza sativa
aaagaatgatgtgggctccaataattgaagacaaaagatcaaaaggctaacaacctttatcttggtgctagcatataccatcatgggccaaatcatctctcttcttcatgctgggcactgctgtgctctagcatcttgctacgacaccttgtgctgccgccagaatcttttttgttggaaccactcaattgccttgtctcaaaaagtaatagtagtggcaaaattgcacttctgataggttaggtgaaaagctttatgcggtgcatcaagagggataaccaggtcactacttttcatgacagttttcagtcatgccccaacagagttgattactaactctggtcttgaatagaggccttgcacctagcctaaaaatcctaaattagaaatacgtggaagtatggatgaaaaacgattagaaaacggatagaggcttgcacctagctctatcatttctattttcatgtttctttttagaatatgaatcaaaataaggaacctatatacgaaaatgtaatcgaatatcatcgaatacattaacagagtgaatcgaatacggtaacgaatatttattagaatatgaaaaaactccaactaagcttctaaaatcaacaaatagatacatctcattattttttctaaaacaataaaattgatacttctattttttatcaattaataataatacgactagtttcacactttatttctcaggagaactatattaggaaaaaaatgtgtattcgtatgacatagcgtaataaaacaaaaaaaatgtcattaggcaatagaaaaacaaatctaatgcaccggattagaaaaatatccccattcaactaactaatttaatactcggtataaatctgaaccatttttatccctacgtggaatttttattctgaggaaaaaaaatctaattttatttctgcaaagtttctgaccaattttggtttttgagcgatagtaggcttaccgtattcatatttgttttcaagaaaaaaaaatcaaattcgtttccattttcaaaaattgcaaaaataaaaaaaaagcaatggacccttttggttgaaactttccgaaccatttttatccctacgtggaggagatagaaaggtgttatataataaaatgatgttacatgacttatcatgaaaaatactactccaccatacaattatatttttaataatatttaaaatagcaatgaccaaatatatgctttagagatcgtattgatgtaataaacgaagtaaaaggatcggagaaaattagagcattataacccaaaatggtcttacagagttatggtacgttatattgaaagagaagtcgtgcataaaaaatacttcataaagcctttgttggaaacacacttctcaatgtgtttgaatgaccccgcaaaagcagtcgcaataagaacattggtcaacatatgcctcttaagagctacaataagataataagcgagttatatatgttatcatattatatttatacttatgtggaagaaagataagaaatgatggctacagatttgtaaccatctgcagcaaagtctccaacaaactactccctccgtcgaaaaaagaaaaatcaaccttaggttgaggtttttttttaagacgcaggagtgtatgaaagagatgggtggattagatattaatgatgtaatatatatatctataattaactattgtatgagtggactattaggttgattatagatgatgttttaatttttgaagccaaaagttggctatattattaaacttcgatgcaacttctatattattaaacaaagccatgggttaatatagtagtaatttttaaagcaacttctatgcggttcgagaaatgtgcatatagaaaactatgcacatttctcctatacaatgttttttttcctgaggaaacatgcagggagttcctacaattctttatagaagaagaaaattgatccagtactcctatacaatgttcaaaacattgcctcctttgaa

SEQ ID NO: 880 - DNA, 2000 bp, Oryza sativa
ctataagactactgaaacaggaaacaaaaccatttttaatggattctagggatttttatgaatttactgagacttgaatggacttacacggagctccgatgaattagatatgaattttagaagataatctgtgtttttactactaaagaaaaggccttaattaattattgcgcaataaaaccccagggctgacgtcatcaagggagggggcgcggcgccggcaagcgggccccgcctgtcagcggcacgaggcggctggtccaccatggaccgggaccacgcgggtggtccaccgccggtccacgggaccgactgtccagatcggccgggaggccgatcggacggcgcgggcggtggcttggcatggctcggctcggcacaaaaccgaccggccggccttggggagcggcggcggcgagcggccgccggcgacggcaagcggcgccgcgggaggcggcggcaaccggcgcaaaagcggcggcgcacggccgaagacgacgacgcacgcgcggatcacagcggtgctcatgggagagaaagaggaaaggaaggaggagagcgggattcctcactggcgagaacggcggccggcgcgaaggaagaaggcggcggcgacaaccggcgatgcggaggcgcggacgggcggcggtggcaccctaggagggagcagagatgggttaggggtggggtaagtgaccacggcggccaccattgttgaccggagacggagggggatggatatctcacctgctcgcgagggagatagggttccggtgggattccggcaacgcgaggcggtggtcgagatgacccacgtgacgacgaagctagcggcggcggcggctaggcgcagcaacggctctagcggcggcggtgcgcggctgaaatacggcggcgagcggcggagctcgggagagcagcgcgacgacgatatgaggcacgggagagagcggcgagcgcggaaaaagggagaggggactcgggggagtgatttataggacacgggaggggcggaaacggccggtgatggcccctatttggccggagacgtgggagagtggagagagagagaggggacgagattcaaatcgaatcccgccgatttgcgggcgcgcgcgcgagcgggaaaggcggaggagcggcgggcgacgacgtgggcgcggcgcgtgtacgtggagtgggcgcggtcgacgcggacggcgacgtgggagcggcggtttcggcggcggcggttggagccccagctccaacggctggaggtgggagacgaccgacaggtgggccccacctgtcggcgcccgaaggagagagggagggagggaggacttcgggaaggggaagggaggagcgggccggcccaacaaagagggcgcgcgggagggaggttgggccgacggcccaacaaagaaaaagaagggaaagaaaaagaaaaggaaaaaggaatttccctaggatttaaatattgcggtttatgaattttgatgggttaaaattatttatagggctctgaaaattccactaaaaatcctattaatcaattgtgacatgtggaacccaagaaaaatcccacaatgccaattccaattattaattgcatttatcaattagggaattagctctaggttattatgtcattcagaaactggtttgtttgaaatcagttcccttttgtttgaaatcaattcccttggtgttggtggtggtatcttaccagcactaagactttgttatgatcttttgccatcacgtctgaaacagtgcatcaaattttgttccttatttccaagaaactatgtttttgtcaagcatcacctcgtccagttatggatttctcaaggttttatcaaccctgaagaagacagtcaaccagaagacactggtctgcagtattttaatgagttgttctgcagatcattttttcaaaacggtccctctcgcgatgatgatcataaggataagtttgttatgcatgagttatttcatgatttggcgtgctccgt

SEQ ID NO: 881 - DNA, 2340 bp, Oryza sativa
ttccccccttccctcccctctctcggccgccgctccgccgtgcctatggccgccgccggcgaccataggggcgcgggcgcgccgcctcccgccgcagcgccggcgtggtcgccttcgggcgcaccgagcggctgccgcgtggggcccggctgtcagccgcccgcgcccttaggtgcggctgacgcgtgggacccacggcgccggccggtgtgagcccgggtgcgcccggtccaccgtggaccgtggggctgccgcgtgggccccacccccgtggacccggtccgcgcgcccctcccctcggctgacgcaataaatccatttttaaattaaaatttaaatgaagaaattcgcaaatattcatttaaagagcatataaacttcaaatggccataacttggccatttgaactcggaattggaccgttcaagtctctaatttttccttaagaagtcaagaacccatttttgtgctttgttcctgctggttatatggagtttattagagtaaaagccttttcttttccgttggtcgtctagacgctgcagcttcggaagatccactcttcgtggaagttgaagccggcgtttgggaaagcgagcaaggcaagtcacatcatccttgaacatattgaatcccagtttataaaattatgttgctttaaattattgcattatctctttatttaaattcccgcgttatcaccgttttatctagccatgcctatttacctttgttatgaccttattattattgttattgttattattaccttgttcaccctagactaaacaaaaccccaactagtggacactctactcatggtaccactagtatgattttaggtagatgcttcgctgtttaattaggtaacattaggtgattttacaactctagactttgggaatgttctcatcacccggacactatggaattgatgaattattgtggaattggattcacaccgccccctctattcaaaatccccaaaaatggttttaggctgggctcggggtgcatggttttgatagtagcacctcagccatataaggaccggtcttcgggcctctgttgcaaagcactaccgtacttccacatgtctagtgggtaaggcttagtttgtggctcagtctggttataaacaaaagtacacggatggagatggacgaagtcgggggtcgatggacatctccagggcaaatgaaggctacacgagctgcggcctggtagtcgagatgtcatggcacagggccggtgtcctgctgctaggggctcagtcctgcctacctgtctcgggggttccggccgtaggtgggattgggtcggtactcttgtctatggctaggatgggttggaaactatgtcacgtcttccgtccgtataccgtggtggtatgtggcacgtggttacacgtgaggaagatgtgtcttgtgggtaaagatgtacacctctgatcagagtataatctattcgaatagccgcgccctcggttatgggcaagctgagcaatgtacccaagttagtgttttaatccttaaaacctgcttaacaactaaaatgtggaatggttggcctgggttggcttgggacgagctgggacccagggtcgggttgccagttcggtctgaatcatcgtaggccttggggtaaggcaggttcgtgtgggttcacggccttgataaataatactgtatagttctagaatcgtgtttacaaaatagctttgagcaactaagtgtcttttaatgctgtttactgcaaaccctaaccctttatattataactcccttgtactccctcgcatttattctgcacttgtgggtgtgtcttgttgagtacggtggttgtactcagtcttgctcaatttttcccaaacccagaagaggagcccctggaagatgaaggctttggtgtctagctcgtgcctgccgtcaagcgtctgtggtcgtcgccctagtcttccgctgtttcccgtttgtctttatgtgtgctaggccttcgccgcccatgtaataaattatctatttacgcttccgcttgttaaactctgaactgtatcaacttttggtgtaccttgcctcctgggacaaggaataatgcacgcacgtaaggaacgcccgttgggttatttccggtcgtgacattgagtccgctaattggtctatttgaggaagagggaagtggtccttggggcacgccttgttgaggtcggtgaagtcgacgcacaacctccacttcctgttggctttgcgtaccattactggatttgcgagccactctggatggatgacttctcttatgaagccagctttgagaagtttgtccagctcttctcatatggct

SEQ ID NO: 882 - DNA, 2010 bp, Oryza sativa
aggtttttcggacacgaataaaaaaactaatttcataactcgcctggaaaccatgagacgaatcttttaagcctaattactgtcattagcacatgtgggttactgtaacccacatgtgctaatcataggtaattaggctcaaaagattcgtctcgcgatttacatgtaaactgtgcaattagtttttattttaatatatatttaatgctccatatatgtgtccaaagattcgatgtgatgtttttgggaaaagtttttgcgaactagtaaggtggtgtttggatctagaaacttaactttagtccatgtatttagacactaatttagagtattaaatatagactacttacaatactaattatataaatgaaagctaattcacgagacaaaatttttaagcctaattaatccataattagataatgtttactggagcatcacataggctaatcatggattaattaggctcaatagattcgtctcgcgaattagtccaagattatgaatgggttttattaatagtctacgtttaatatttataattagtgtccaaatatccgatgtgataaaaacttaaaagtttcagtcccatttaaacagggtctaaacagggcctaaacagatagtactgtagcattaggcattggtccttgattactgcatgctgttgctactgcttctctccggtccagtctttcgcttgctgataagttctgaagagatgccgacatgagtggttgaggtttaacggtttcaagcttatactccatatgagtaacaagtatattctagtactgtaacaaaagaagttgtttagtactttgtattatagtactttgttgaatatccaatgtcgtagtacgtgtgttctggagctgcctggtcctgcaatgctgtagcttacttccaagtcgagcaggacaagcagattcctgggatgatggtgccggttgggctgctccggggaagacacaagaaattgttggaattaatgaatgggccttagcccactcgaagattaattctttggaaaatcacaaaagcccacctcatgggatggcatgcatgtggagtttagtaccaccttgcttattctaggagagggggacctccttaaaagggaggatgccctcctagccacttgaagcatgtgtggtggagagaagaggggaaacacacgcgcgcgctcgctcgcctggcctggcaggcggcgcgcgtgcacgacgtacgcgtcgaatggtccgaaaaattggctcctcacccttgcgcagatgcagcctccttttgcagttttgttttgctgcaaattcggattcgttttgttttggaaacgttccgaaaaatccggtgcgtgcaaacggcgtggagtccggataagttacgcgcgacttatccggttcggttacgcgcagtagagatcgtgcgggcgccctgatcaagcgacccttctctatataaaccgacccgccgtcttcacgcaatatatgcgaaaatcaatctagggtttgcctcctactctgtactgcaccgtcgctcgtagactactccatcccgctcgccggcgtgcaccagcgatcgggagagcaggtctccggaacctctgcctttgacgtcctgcaccgggagaaggcggcaataaggtttttgggaagcgcttcgcgcgactgctccctgttcgttcgcgacggctcgccttcctcttcgctcgcgtgtttcgtgccttcgtagacacctgcgaaaagtttcgaccaagcagccggtcttttcgtcacctcggtacgtgttcaatatgttgcgcatatttgatctgttcatgttattctgcgtagtttacatgtgtagatctaatgatgcgttcatgctagttttcatctgtaatgtcatgatttatttatggaataaattaaatccttatatgcccataatctcaacaatccaaaaaccttattataggcactgtgattttactatggctggttttgccgatgcactgaggccggataaattcac

SEQ ID NO: 883 - DNA, 2000 bp, Oryza sativa
  misc_feature (497)..(497): m = adenine or cytosine
  misc_feature (499)..(499): n = any nucleotide
  misc_feature (1997)..(2000): n = any nucleotide
taggccggcggcccgaagagggaggaggggaaggggaagctggcccgtggagggagagagaggctgcgggctgcgggctaatagtgtatactttataccttataccatggtattttgctgtaatttttttagaatatttgttatgcaaattatatgaagttatagaagaatatattttgctgttgagacttaacaattagacttcgtataattgtgttttatgatgaattgtagactgttaagacttgagaattgaacttgacaaaagtttgaagctcagtttgaggggtttttgtatttcgataaattttcgttaccgtatccgcgccggttcgttttcgctccgttttcggtttcgataatattcgtttccgttttcgtttccggggtttccgattccgaaaaaaaaatatgaaaacgaaaacgataaaggttgtttctgtccgtttccgtaccgtttcacccctattcttaaggtacccctataagaagaaacmanatgttactagaaaaggcataacaaaatacaaaataggttccccgcaaaaaaaaaacaaaatacaaaagaggtttatgatcgagcaatcatctcatactacaaagcaaccattcgagattttgtccattcctaaccaaagcattaaggcattaaagcatttatgaggaggtttcttcacctgaatgtcccttgcttatcgaagacagagacagaggcagtgagtcataaagcgaccagttcagttccaacacgaaatcaactacaaaccgtccatttccaagcaagtaattgtcatgagaaacagatcaaaatcacatcatccatgaggcgcctccgctgtcaggaacccaaagatggtcccgctcgccgatggaacaagacacgacacggccccgcgcacctctgctgggctgtgcagtggtgcctgtacaagggtggccgtgcgttgcggttcactacacgtcaggcaagcggcaacaaaacaaaacaggtcccatgattctttttctttcctgcaaactagcatagcaaaccctgaaaaagagttatgttttgtgtgattattcccatggagtctaattttgttgattttagcccctcagttatttggttttgtaactttcattcatcgcagagctcgtgtgaaatctcggatcaatcaaatcgaactccaaggtttatattgtcacttactacggtatgaataaaaatcaaatctacaagtataattgcgcaaattcctcatactcttaaaattgttaaccaaaaatatcttattccactatctatagtatagttccatttgaattgttagctaaaatctacatggttcaacgctaataagtgagagttgagtagttgttttatcaccttagatcttattattatttcttaacaaagttatgactatgtaacttataacagaaaccggagatataaatcattcattttcattatctaaaaatgatataaattgtaggagttacattgcaattatgctagtatgttttcttcttctttacccttgcccttcctgtcacgtgaatgagcagcatcgccttgcattgcattctacatgactaatctttaacagtaaaaaaagaagacaaaatttgaaagaacacgccaagaaaagagacttttaagaaaaacagaaggcccaagagcgattcccagccgtcgaaaaacccgacaaaaaaaagtgagcccgttttaattcccagccgtcgaaacctcgcgcaaggcaacaagcgtgccacagcgcgcggcacatgaaccacgccggtgacgcggccccaccagccagtggcacaccacgtgtacccccgtctcgttgacacggcacggcaaccagatatttttaacccaccaccacctcgattagaatagaagaattcctcctctcctcgcgttcgcaaatcgcatcgctcctctctctctctctctctctctctctctctctcgctctgacacacttgacactgcacgcgcgtgcgcnnnn

SEQ ID NO: 884 - DNA, 398 bp, Musa acuminata
  misc_feature (4)..(4): n = any nucleotide
  misc_feature (44)..(44): n = any nucleotide
  misc_feature (126)..(126): n = any nucleotide
  misc_feature (216)..(216): n = any nucleotide
tgtnaatacacggggaaagaaagaaatactgatgtagttcagangataattgatcaatgcatcactagaagatggcactcggacaggaggagtctacgcagctgcagcagcctcttctagcaactncttgaccttagtgatgtagtcgctcatggcgtcctcctttgatttgccttcaacagccttccaagcgtcccactttgctctgtccctctnattgaacacacccgggcgactagtattaactggtccaacagttgcttgcttgtagagaccgtagagaatcagcttattctcattggtcgtattttcaggcaaggtctttgctttctcggcatattcttcaaactcctccttcaaacccatcgatcggccgcgccacttcctcttctctgctt

SEQ ID NO: 885 - DNA, 550 bp, Musa acuminata
  misc_feature (5)..(5): n = any nucleotide
acttntgtggatgtaaaacctaaaattgctgatgaatcgatggacaaatcaaagatctggatactttctgaacttaatgaaccaactcagtgtcgatctttaaggcttgtggataatcttagaacaagcaagatttcaagactgatttacaccaattctggctttgccatcttagctttagcatcaaatgcaattcatctcctctggaagtggcctcgaaatgaacgcaattcaagtggaaaggcaactgcaagtgttgcccctcaactgtggcaaccaccaagtggtatattgatgactaatgatataactgacacaaatcctgaagaaccagtccactgctttgcattgtcgaagaatgattcttacgtcatgtcagcttcaggagggaaaatatccctattcaacatgatgacatttaagactatgacgacattcatgccccccccacctgcagcaacttttcttgcatttcatcctcaagacaataatataattgctataggaatggatgattctacaattcaacctacaatgtccgtgttgatga

SEQ ID NO: 886 - DNA, 625 bp, Musa acuminata
  misc_feature (617)..(617): n = any nucleotide
gcaagtgcgttcaccatagtgttagatatctactgtacatactcttatagtaaaaatttgtccagagatctgtcagcagcttaccaaacaacacggcagatattaaaagataaaacataaaacatataccttctgtggaggcaaaacagcactgaaggcaccatctggataatacccaaaccaagatgtctctgggggaatcaaaattgtgtcatgttcaaacattatcagaaccaaattctgtaagctactaaatctttccttgtatgtggaattccgttcggtgggcagttcattgttaagcttaggaagaaacttgcatccttccaaatactcttggatatcagttggaattttgagatacccactaggagccagatgggcctgcacatagtcagaatagacctttgatttgatgaggtcatccacgagcatgcagataatcccagaaccacatagcggtacagaagcagtaccagcatgaggtccgcctagtgagataaaattttttacaggaggtccattatcgcagaattcaataactgctcgaccaattaagtttccctgggaaagaccaacaatattgtagcccatgctgattccttcatttccggtancttctcac

SEQ ID NO: 887 - DNA, 615 bp, Musa acuminata
  misc_feature (2)..(2): n = any nucleotide
  misc_feature (478)..(478): n = any nucleotide
  misc_feature (573)..(573): n = any nucleotide
tnatttgccttttattggtcgaatagattacgacagtccttaccaggaaacacttattcttctgcctcacggccaagtagggaaaagcctcgtgacctcattcataccgaagtcttacaacacaggtgagaaacgtgaacgaaagagaagcgaatagtctcttccatgattcatcatcatcagtcttcatctcttctcccacacgcagtagtcgttgccagaggcaacgacgtggaagttggaaggaacgagattccccacgtcgtatctcgagcctagctttgtcagtatcttcccatcgatcattgccatgtagaggtcagcatcggaggccagaatgttgagagcgctacccgaatgaattccatttcgtgttctggtttcagccaactgtgttatcgcctccttcaatccccagtcgaacatgtggtcgtagaagatggaagggacgcccggatgtgtgagtatataagcgtancttgcatgaccttatcagaaggaaaaggccacaacctttgcgtcgaaccggtatcgtggttgtcgacgaaagtgacagccttctccggccaccancccatcatgccggggcgccttcccctgggaatcacgcatcct

SEQ ID NO: 888 - DNA, 580 bp, Musa acuminata
  misc_feature (4)..(4): n = any nucleotide
  misc_feature (33)..(34): n = any nucleotide
  misc_feature (36)..(36): n = any nucleotide
  misc_feature (38)..(38): n = any nucleotide
  misc_feature (58)..(58): n = any nucleotide
  misc_feature (60)..(60): n = any nucleotide
  misc_feature (63)..(63): n = any nucleotide
  misc_feature (67)..(67): n = any nucleotide
  misc_feature (71)..(71): n = any nucleotide
  misc_feature (90)..(90): n = any nucleotide
  misc_feature (111)..(111): n = any nucleotide
  misc_feature (191)..(191): n = any nucleotide
  misc_feature (391)..(391): n = any nucleotide
  misc_feature (497)..(497): n = any nucleotide
  misc_feature (564)..(564): n = any nucleotide
accntgacctgtattagtcgacatacggacacnnantngttctttcttgaaatgcccntntcnctgnttcnggtcttcaaggaagcattnatacatcagaaaaaaaggaanaatgaagttgaaatggagaagcaacagctcataaagcctaagcattatgccgagtgacatcatgacaacagggttagccncagttaatcactggctgtcgaatcttccgtgtctatttccttttcatctctgataccactcgaaaccagaacttcatcagaagctaggtcaggagaatcttggagcacctgtctcactgttgtctcctcggtgctgattgtttccccactagggctttcagcagttttgtcaacctgggaatcttggagcacctgtgtcnccgttgtttctgtgccagttgtatcttcatcaggttgttggagagtttcatcaactttgtagtagaccacacaagtgcgtgccggagataggattttgaatgagtncggacggttgttgaagtttgtttccgagactcctggtattccttccggagatgtaaaatggtctatntcatggccgactcttc

SEQ ID NO: 889 - DNA, 434 bp, Musa acuminata
  misc_feature (2)..(2): n = any nucleotide
  misc_feature (18)..(18): n = any nucleotide
  misc_feature (22)..(22): n = any nucleotide
  misc_feature (56)..(56): n = any nucleotide
  misc_feature (72)..(72): n = any nucleotide
  misc_feature (83)..(103): n = any nucleotide
  misc_feature (138)..(138): n = any nucleotide
  misc_feature (164)..(164): n = any nucleotide
  misc_feature (168)..(168): n = any nucleotide
  misc_feature (178)..(178): n = any nucleotide
  misc_feature (197)..(197): n = any nucleotide
  misc_feature (257)..(257): n = any nucleotide
  misc_feature (299)..(299): n = any nucleotide
  misc_feature (344)..(344): n = any nucleotide
  misc_feature (355)..(355): n = any nucleotide
  misc_feature (376)..(376): n = any nucleotide
  misc_feature (401)..(401): n = any nucleotide
  misc_feature (407)..(407): n = any nucleotide
  misc_feature (421)..(421): n = any nucleotide
anattaatatctgagcanatantatatataaacaagctcagatgctggcagagagnatggtcaaaagagaanaggtggattcnnnnnnnnnnnnnnnnnnnnngagacatggccgatggcagcaacgcagcacttggnactagtacttgtaatccttcacgtanaggntctccgaggncgctgcatcagcagcgcanccggcgtacttcccgagcgtcgcctccgagttggccttgcacctcgccaggaacgccgcntgggccgacggcacgttctccttcttcccgctccacttcttnatggtgctctgctgcagagccctgccgaaggagaaggacaaggtncacggcttcancaccccaagcttgttcatggngttaaggttcagcgttgcgtcctcntcgctntgtcctcccgacangaacacgatcccc

SEQ ID NO: 890 - DNA, 630 bp, Musa acuminata
  misc_feature (4)..(4): n = any nucleotide
  misc_feature (28)..(28): n = any nucleotide
  misc_feature (111)..(111): n = any nucleotide
  misc_feature (601)..(601): n = any nucleotide
ttantgccagctaaaatgtggtaaagancaggtctcccaagtggtggagaagctgaacttccaattagttggaaatgataattatcacaaagcaaataaacaagttgtgcngatttttgagagttgcagaatctgaaatatggcttattcatccttgaggtgccttccctcactcggttcttagcaagaaactaccagaaaaacccacggattctcaacacaaaattcagaggtcaatacatgagcctcgacttgagagttaggagtgtgtcctcaggcagacgacttgactgtagcagcattgatgatgtccacgaattccggcttcaaagaagcacctcctacgagaaatccatcgacatcaggctgtgctgcaagctctttgcagttagctccactaacagaacctccatatatgatcctggttgacgctgcaacttcagcactcacgtttgtttgaagccacttccttaattccaagtggacctcctgggcctgagctggggtagcaacctttccagttccaattgcccaaactggctcataagccacgaccacattggtccagtcagaaatccgttgcaatagcttttgtttgtgnagaactacatccatcgtggtcctgactca

SEQ ID NO: 891 - DNA, 675 bp, Musa acuminata
  misc_feature (97)..(115): n = any nucleotide
  misc_feature (484)..(484): n = any nucleotide
  misc_feature (571)..(571): n = any nucleotide
  misc_feature (577)..(577): n = any nucleotide
  misc_feature (580)..(580): n = any nucleotide
  misc_feature (587)..(587): n = any nucleotide
  misc_feature (601)..(601): n = any nucleotide
  misc_feature (611)..(611): n = any nucleotide
  misc_feature (619)..(619): n = any nucleotide
  misc_feature (652)..(652): n = any nucleotide
  misc_feature (656)..(656): n = any nucleotide
  misc_feature (670)..(671): n = any nucleotide
agtggattggacatagtggctgccaacgattagatcaaggttttgatccggagaacatattcatgtgcagcctctcgctttgatgcttcagacacannnnnnnnnnnnnnnnnnntctttacacgcagcacgaagttgcagacagagaagaaaacatggctatggggattaactatatctaaactgttctgtatcttttctgagacacaacaacgaacacctgtcatatggcgtcggatttgggcttcccgttgctcatctccgtctccgccttgcccacatggacgtcctcgtccgcgatgaacttgctccagaaccagtgggacctccagaccaggatcatctcctcgatgggcacgttcttggtctcgggcaggaagatggagatgaaggtggtcatgatgagcacccacccggcgaagaagtagaagaggccaaacttcatgtggcagagcatggtgaggaaagcctgcgcgatggcganggtgaagaacatgttgacggacacgttgatgctctgccccgccgaccggatctccagtggaaatatctcgctaggaaccaaccagcncagggntcnccatgancaggcgaacccggngacgtagatncagatgcngagcaccacgaatgccgcgtaagccttggacangtgnccctctccgttggnnccga

SEQ ID NO: 892 - DNA, 707 bp, Musa acuminata
aaagaagcattggattggtggagagaatataaaagccgttgcctatgatgtaccaatacctgggtacaagactaaaagcacaatcaacttgcgcctctggtcaacaaaagtaccatcagaagattttgatttggcagcttttaatgccggacatcatgccaaagcttctgaggcgcatcaaaatgctgaaaagatatgctatatattgtatcctggagatgagtctatggagggaaaaattcttcgtttgaaacaacagtatacactttgttcagcctctcttcaagatatcattgcatgttttgagaggagatctggaaattctgttaattggaaagaatttcctacaaaagttgcagtccaaatgaatgatactcaccctacactctgcattccagagttaatgaggatactgattgatgtgaaaggtttgacctggaatgaagcttggaaaattacacagagaaccatggcatatacaaaccacacagttcttcctgaagctttggagaagtggagtttggagctgatgcagaagctacttccgcgacatgttgagatcatagaaatgatagatgaggagttgatcaacttcatcatcttagaaaatggaaaagaagatctcgtgcttttggagaagaaattgaaagatacgaggatcttagacaatgttgactttccagaatctgttcagaaattattttata

SEQ ID NO: 893 - DNA, 509 bp, Musa acuminata
  misc_feature (7)..(7): n = any nucleotide
  misc_feature (491)..(491): n = any nucleotide
aaatttnagaatctatcaagattgatatacattcaattaaattcaaggtttgagaaaacctcatagtcagttttcccatctacaaagctatcgatgttctgcattccttctaataaagatggttgaaatccatcaattctggaagggagcattttatagcataataacaacccaagaatgaaaatagcctgcagctttgtagagtccccctgaacagtgaagaatagtaacatcgacagaagaaacaagaccacacagaaatgcataatacacaataccctgtccatcagcttcccatcattaccagctggaaagcctcgagctctgtacacaaacaagaagttgtacttgtccaccacatagcggtaaccaaagtagacagcaccaacaggaaccacaagcggggcaaacaaagaatagatcatggtcagcgcaaagattgtcaggttgaaagcatagtactgtggcaaagtcaaatgtctgctttgggncatggaagctcctattca

SEQ ID NO: 894 - DNA, 571 bp, Musa acuminata
ctactacctatgctctcaattctcatacaacacttaagtacagtagaaggggttagatagttttgcaagtctgtacaaagtccaagaccaccatcaatggccatctccaccacaacaccagttgcacaggtatgctgacccattggaacactgcaccgttgggcatcccctactcgaacagctcgggaagtcaggtttcctaaatctgattcggcagcagcagtttgcagtgaagctcgttgtcatggcggcgctggtggtagcaacaggttttgtaggcgacttgagagtttgccagatcttcttgagccgggttgcagtggtgatgttctccatttcctgaatgaacttgcggaggtggcggatgtagtctggatacagctccaggttgcaatgacctcctcctttgatccataagggctcatacggctcctttgctagtttccacagaccatgtccgtgaagccaattcactacatcatcctcggtaccatgaactgcaaaaactgggcacttgaccttctttattttgttaatgtttttataaatgtcgaagcagaaattgaaattg

SEQ ID NO: 895 - DNA, 615 bp, Musa acuminata
tcatccagaggagattttattgggtgttaaaagagtgacacaaccataatccagcaggtccacactcgaaccttatccccatttttggcacataaaaaggctacaagaagaacgaacactagtcaagaattctcagttccgaagctctctttggaggcaagagaaaagattatttctggatgattgactttattttgatacattctttaccgaacagccctgagatcgccttcccagggtcgatctgcttgatgagagactctccaaccaacactgctctaaccccagcaccttgtacatatgaaatatcttgaggagtaaataagcctgactctccaacaactattatgcctcttcgctggataatttcgccacgctctccctccagaagtttttttgtgtttgaaatgtcaacctcaaatgtctcaaggttacggttattaatgccaatgagttgaattccatctatcttcagtacacgatccatttctctttcatcatgcacctcaataagagctgctaaaccaagcttccctgcagatcatggtcatgtacttgatatcaagatctggtagcactccagcaattagaagaactgcatctgcacttttgacg

SEQ ID NO: 896 - DNA, 419 bp, Musa acuminata
aaaatgcatcattatttagatcatatgtacaagcagtcaacgatcccaagtaacaaacattagaactctcagttgttttagctgaaataacaggtttcatattcttattgcacgacaacagaactcatggacacaaaggaccgtcaccagaattaacagaagcctgagataacacatctatataccaaaacgtccaggaaagtttggcctcgaagttaaagtggctgataacggccaccaaatgatggagtcgacattaccgatagtacttcagttacagaagccatggaactcagagcagccttaagaacatcttgtgaacacccaggcttcacaatgctcttcaccttatctaggtatccctggagcttctttattcggcccatgtaatcttgatcctcaacagagagtgtgtaggt

SEQ ID NO: 897 - DNA, 412 bp, Musa acuminata
  misc_feature (371)..(371): n = any nucleotide
aacaatgtgtatatggtgggtgatctcgcataagtaatggatgcattgttaaaatagggcatgtgcgatctaattattatccctcccatgtatgaatgacgcattccgcttcctgtgggtgcttctttttccaaactgataaatacgtggtcatgccgaaaccgacgccactagcaaggtcttgaggacaacctcaaccaagttctgcacacctcccaggtagtgccctgtttccttcagctcatggtagtcgatccagctaaggcggctgcagatgtatcgctgtagagtaaccggcacgagcccgtcttcatccccatgccatagatgaactggaaagggcggttgcgagagatccatcggatcaaatncccacttcccgaacatcaccaccatgtctcggtaaaacgac

SEQ ID NO: 898 - DNA, 556 bp, Musa acuminata
  misc_feature (512)..(512): n = any nucleotide
  misc_feature (533)..(533): n = any nucleotide
ataagttcttaacattgcagaggaaattatggttcagtatagtgacaaaccacgttgataataacactgctcaaatgttttcaacaatctatcccagcctgactacttccaagcatatcatccttacaaatttagcattgtatgtagtagtccaatgtgaatgccgccgacaagtcaccagaagtgtgctacctgcatcagtaaggtctgtacctccaatccaatcttgacggcctgctgctcccgctggcgctggcgctggcaccgtaaccataatcatcaaaatcaaggctgccgtagagcctgccgtagtttctcataggaccataccctccataagcctcagcagcgtccatgaaacctccactaggaccagcatcatcaagtggtgttgctgagtctcctgtccaagaatttcgtgtgttctgcgcgacacacgatctgctacaccatcatcagcaaaagtcacaaaaccaaaccctcgatggccgcttcttttagggtcctttggnacatatacatccacgatccgnccaaatctgcaaagtactggcgc

SEQ ID NO: 899 - DNA, 556 bp, Musa acuminata
taaatctccaacaagtgttcttacaggtattcaaaacctccatattatgtggggaaggcagaaaattcggtaacacccaaaacaacattacaatatatatacttcatccgctctgccaaaatttgtaatcccctagtgaccgaacatccacactgctccagctgatccatccataccacctcacttgctatcagtgaaatcagcatcgattacatcaccattgtcgggccccttggtagatggtccagcagatccagcatcggctccaggagcagaacccgggccagctgcaccaggctggttataaagcgattgcccgagctgcatcacctcctggttcagggctgccattgtgtccttcatgctttgggttgatccaccagcaacagcatccttgaggtccttcagctttgcttccaccttttccttgacttcggcaggtaccttgtctccgagctccttcagttgcttttcggtctgataaatcacagactcagactggttctttgtataatgtcgtccctcttctccttgtcctctttggcaaatttctcag

SEQ ID NO: 900 - DNA, 633 bp, Musa acuminata
  misc_feature (7)..(8): n = any nucleotide
cagttcnnaaaatattaccaattctttgattcttcttcaggcaaatagtcaatacttttgaatcatatgattatccaaccataacatgtcttcttgatctgagattatgttgtggaaaggacagattccgcaagagaagcacaagcaagacccctgatcctctcacttatgacgtattggctgatacaatattccttccaggaatattctagcacctatttgccacagctgccgtcccacaacttcactggcaatcatacactctaattttgttgtcacatacagaatctaaggtttaccacatcgatggaacatagacttgctctttcaaattttgagttgcactctcagttggaaaccctctcacagcaccaattgtccattgtgaaatgattcctgcagcaacagcaaaccggagatgcctttctaacatgtcctgatcctcatacatctctggatgtattgttagcttcctcatgatcgcggccactacagcatcaccggagccagtccgatcgcatgtgaacggagtaatgaggacatcctctgtgccaacgactgccccatcaaacttgggggtgtataatggatccgaagtgtccatccgttacgataagatctttagccatcatg

SEQ ID NO: 901 - DNA, 471 bp, Musa acuminata
  misc_feature (6)..(6): n = any nucleotide
  misc_feature (354)..(354): n = any nucleotide
  misc_feature (454)..(454): n = any nucleotide
  misc_feature (460)..(460): n = any nucleotide
gactgnatattattacatctttcagcgtacgattacacaaacagatgcaacactcttcaaagtttgacgagtcactctgaagttagaaacataccagccacctatgttttgaaggactaatcttcttcagtttgtctttccattgacgaggttaatattgggcaacatctatctaagcctgtgctccaagttccagaagcaaggtgtgattgacgtcattagatcctggaccaataaactgaatggggccagggctgatgtatctgttcttgagagcccatacatctctcatggatgcaaacttttgaaatggtgcaccttcaagctccaccattgccttcttgatcactggcntgaacttaccatgtctcctctcaacatccatcaatgaagtcaatgcagtccctccaacagtccattcattaacaggagcactcaagttaccaactgaggntatgangccagtctttc

SEQ ID NO: 902 - DNA, 622 bp, Musa acuminata
  misc_feature (6)..(6): n = any nucleotide
  misc_feature (12)..(12): n = any nucleotide
gttatnatgctnggtgataaatgatactataaaaaagtgatttggagaggcttgctttcaagccaacatccactctgtaaaatcataattacttaaaacaaaaacaaaatggtaggaccagctacatgcaacctcccgggaaatgaattaatccattagcttgtatctcttctcttgaacaccgatgacgcccatttgtatctcaattattgtgtgaagtggaacttcaatgtgaggaatttctttcaatggtctgtcagcaaaatatgaatataatgctctcaacacagcctggtgagaaatgacgacaactggtgcacgttgccgttcaagctcaataattacgggttccaacctttgaatgacatccaagtatgactccccacgagggtatcgatatctgagcttgtccttcttacgtgattcatattcctcaggcatgtttttctttatttcttcgtaagtcattccatcacatactccggcatttatctcttcaagggcacgccattgtatctttgggaatccaacaattggacttgcagttaatatagttctttgaagtgtgctagtccatatggaagctgtcctctcagacttcagtctcttctcaacaaaattt

SEQ ID NO: 903 - DNA, 537 bp, Musa acuminata
  misc_feature (265)..(265): n = any nucleotide
  misc_feature (506)..(506): n = any nucleotide
tgatatcattacgggcagagaaaacaacaaaaagaagctcacagtagttgattttaatgccaactaaaacgacggaacgagcgtactaactactacaagtcttagctcttcgatgcaggtattacaggacttagcaaggtcttaagaaagaaaggtatatgctgatacaacaaagacaagacttcatagtcgtggtcagcccaaggatttcaaaccgatatttctgtcctggaaattaaaatgccatcactatctgcatagagcnactcaccatcacaaatcctagtccctgcgatattcaccggtacgtgcttctctccatatcctttcttgtttgccttcatcggatgagaacccaaagctcttacaccgatatcacatccattgatctcatcaacatccctaatgcaaccattaacgatgataccagcccacccattgttttgagcctgttgaactgggttaccacccaaaattgcacaacgcatgcttccggccaccatcgncaaccaaaactctaccgttaactttctcctt

SEQ ID NO: 904 - DNA, 629 bp, Musa acuminata
  misc_feature (409)..(409): n = any nucleotide
  misc_feature (607)..(607): n = any nucleotide
ccattaaaacttatttttggttgatacaaccagttttctgtgtcacagccgcagctgctgtcaagagattgacgacttcctgctcctttccttgtatctatcagctgcctatagaccactacgctgatgcttgcttggctgtgtattcacaggagaatcctacacgatacgagaggaaacaaatggtttcttcgaggtagaagatgaagtccttaggcgatgcactcaactgcggccgtcaataaccggggacgaacgtgccgacgtaaccaaatccgactacaaagaaagcaattgcttggaggaagaggtagaggaagtaatggttcttcccaaaggccacatcgtagcacccacagaagaagaggtaagcgcctgtccaaagctccagtagatgtaatctatcgcnaatcctaatcggtggcttcctcgcggccttgaccgccattttggccttcacagtgtctcctagcttctctgtgaccacccactcgttcactcttcctgcttccaacaggccaatgagggtggttttgtctgtgcagggacatgacgttctcgaagaggatccaaaacaccagcagtgagagacgtggagttcgacagnttgagaaggtgatatggaaggg

SEQ ID NO: 905 - DNA, 607 bp, Musa acuminata
  misc_feature (138)..(138): n = any nucleotide
  misc_feature (595)..(595): n = any nucleotide
aacttgttatgcatccatgaaaatgatttgttgggccacaaaacatgctcataaataatatgacctgtgttctcctcttgagagtgaggtaaatctactaatgtcaactctcatccagcaaaattcgctagctgcaanaccattataatattctcagagaccagtcgtcggcgacgcgaacattgggtttcctgatagtgagtgcaactgggggcgacgccctccggagggtgagtggaccaagttcgatgttcgtttcatgatttcctggttcgaccacagcttttttggcgccggatggcagtccgagaagtatgattctctccacagtgcaatctgcggaaaatttcttgtcgcctacgttggaggggcgaatgtctatcgacgttagcttgcgatcagcgaatataaaacgccgatggatgtatgcgccctgctcaaagtcatagcttttgccatcatcgatgtagagctccccttcggcagcgagtgaaccattaagggctattaccagagtgtaagggtcgttcaccatctgggtggaactgcgcctaaatctgtcctttctcgggaataatagtacctgctctctggnaactgggtatgc

SEQ ID NO: 906 - DNA, 529 bp, Musa acuminata
  misc_feature (12)..(12): n = any nucleotide
  misc_feature (15)..(17): n = any nucleotide
  misc_feature (22)..(22): n = any nucleotide
atgctactcttngcnnnccganatgtggattgttgcttaattcctgagtcacccttctacttggaagggaaaggtggactcttggaattcatcgagaaacgccttaaagaaaatggccacatggtcattgttgttgctgagggtgcaggacaagatcttcttgtgaaaagtatgcaatccatggaccatgaagatgcctctggaaataagcttctgctagatgttggactttggctgtcacagaagataaaggatcacttctcaagcaataagaagaagatgtcgataaatcttaaatatatcgatccgacttacatgattcgtgcggttccaagtaatgcatccgacaacgtctactgcacattgctggcacatagtgccattcatggtgctatggcagggtatactggtttcaccattgggcctgtcaatggcaggcatgcttacataccattttgtagagtaacggaacatggcaagaaggttgtgataacagctaggttgattggttgaagaaagcagcctcgcc

SEQ ID NO: 907 - DNA, 607 bp, Musa acuminata
  misc_feature (2)..(2): n = any nucleotide
  misc_feature (11)..(11): n = any nucleotide
  misc_feature (13)..(13): n = any nucleotide
  misc_feature (39)..(39): n = any nucleotide
  misc_feature (56)..(56): n = any nucleotide
anactcgtagnanactcaacaaaggccaatgcatccaanaaggttgcaaaatttanctttgttttcatgccatatcacacagatgatagatatataacactttccggagggccttagtcattgcggtttttcgcttgaatatttccttcactcaaaacaaactcgaaacacccgtaacaagagagatgacggttttaacctcatttttcgccatatgccagttcgtattcagccaggaacattgaagtggaagagccaggagacaacaaatgcaagcaccaagcacgcgagcaggaattttagaaaacgatgcccttgccaaaagctccgactttctgaaggtggtggcggagcagcaggtggagctgtagaattgttagattcgtcccactgctctatgggttcagtctcgctcacgccaaccacattgtgtgcagttgagccacaaatctcacagatcttgtttcctttgattttaaaccatgtctcagcgcactgcttgtgggcagcggctaaatcacccttgcaggaacagcctaacacaatcgggactcccgactctggagctgcttctccaagctgagatgacaaatcctggcatctctct

SEQ ID NO: 908 - DNA, 671 bp, Musa acuminata
  misc_feature (4)..(4): n = any nucleotide
  misc_feature (7)..(7): n = any nucleotide
  misc_feature (9)..(9): n = any nucleotide
  misc_feature (20)..(20): n = any nucleotide
  misc_feature (622)..(622): n = any nucleotide
  misc_feature (651)..(651): n = any nucleotide
gcgncgngncaatttgaaancatattaatattcattttgggaaaaagaaagtttggaaaaaaaaatagttttatacaaagctgtatgaagtatgtcgtcccacaaataaagtctatttacaaattaacaggataaccgagtgacctaataatcatccaagacagacttattgctccagcaaacaaccgttctgagcggaggccttgcagattgggcacgcattcttgatcagtaaccatttcttaatacaacaagcatggaaatcatgtccacaactcaatcttccaagacaatcttttcccttgtatgtttccaggcatatcgtgcagcgtcctttctcatggtcacccagcgtttgatctgaacagtaaattgcctccatcaagcatctggagatggcaacttctgatagacccgtgttcacgttaccaatccgttcttccaaagcaagaagatcctcatagctcatgttatctatgtctagtctcatgtcatgatgctcatcaaacaaatttctggaatcatacaaggttgaccgatccatcacagctagagtctctgatgcccatctactgtgggccgatgccctcatccccatcatcacgggatccttatgctcccnttcctctcattcatatggcccttgcaaangaggggatggccccggatac

SEQ ID NO: 909 - DNA, 551 bp, Musa acuminata
atagtgaactcatcacctgtcaatgagcaagaacaacaaggatccaaaatttattgtaacatacaacgagattaacagaccgggggaagtggacaaaaccctagatctatacattttccgtggccagatgtaggagaacgctcacctgcgaggattgtcgtcgccgtcaatttatcagatttgatcgccgtcgggagccttggcggtcctcttggtggattcgtagtcgacgacctcggcgtcggccagggaccgggagtgctggacgatggagcggccgatggagttgatccactcctctttctccttctcagtgtcggcgatgaagtacatggtctcggcccgggtggagatctcgaaggcgaagggtcggttgaggacgtcctcggcgcccttgacggtgaggcaggaggcgacggggatgacgccacgaggggcggaggcgcgggtgacgtgggagtccttgaaccagaagagcttcccctgcttcagcacgaaccaccggcggcgccacgtcttgatgtactccccctgctttgtcagcaccccgg

SEQ ID NO: 910 - DNA, 619 bp, Musa acuminata
tacaacatagctcaccgagcaatctcccttattttgattcagttggtaatgcgatacaaccgatatgatataaaacttatcttgtcaagataaaagctacaaattgaatgagcaacaacgaaatagtcactaagaagtagagtaacataagaatcatttggtaaagatgttgatccaccctatgaaatgctcattcggacgcttaattgcataggaatgcatcagatctctcataccgtttcagccattccactatgcaatatttctttctcgcatcaatgcttctatttttgcaacatcctcaggagtgtctacaccatgggcgtcatgattcaccttgattaccttcatcttgtacccattttccagcactttaagttgctccaggtcttcttccagttgcagaggagtaggtggtagttgtgggtagatcttcaagaactttgcatcaaagctctgaatgcctaaatgaagtagataaggaaattgtggttaactttccctgacttgttgaatgggtcaatcccttgagaagtagatcgcataaccatgattatcaccacacactttaccctgttggatcagtcacttcagcttcaagacgtgacagagtctgaaa

SEQ ID NO: 911 - DNA, 1050 bp, Musa acuminata
  misc_feature (40)..(40): n = any nucleotide
  misc_feature (42)..(42): n = any nucleotide
  misc_feature (87)..(87): n = any nucleotide
  misc_feature (99)..(99): n = any nucleotide
  misc_feature (201)..(201): n = any nucleotide
  misc_feature (205)..(205): n = any nucleotide
  misc_feature (350)..(350): n = any nucleotide
  misc_feature (489)..(517): n = any nucleotide
cgtgtacgtgttcactctcatcccatgtacggggagttcntntgacgcagagacgtgaagatcccgccggcggggaagatctacgcnttcaacgagggnaactacctgctgtgtgacgacaagtttcgggcgtacatggactccctcaaggatcccgggcccaacgggaagccctactccgcgcgctacatcgggagcttnttgngcgacttccaccgcacgctgctctacgggggcatatacgggtacccccgggacaagaagagcaagaacgggaagctacggctgctgtacgagtgcgcacccatgagcttcatcgtcgagcaggccggcggcaagggttccgatgnccaccagaggatcctcgacatcgaacctcaagaaatccatcaaagagttcctctgttcattgggagcgtcgaagaagtggagaagttggagaagttcttggcgtgatgactgcgaactcaaacaagaatcatccgccannnnnnnnnnnnnnnnnnnnnnnnnnnnnccgaaggaatttgttctgagaaaggagaacctgtaacacctaccattgttggaagttgcactgtgaagcacaaattgttggatggatatacagcttcaatttcttgtttttgtcctcgaatctctaattacaatttggtcttgtatctctaaatctggctcaagcactcctcctacataggattcgaatccaagaaggattggctagctaatccgggcagcatctgacaaggacagaaacaaagaatccatctccttccacagaaaagcaaagagagaggtccacccgagcagcacgatgttgaggtgactactgcagaacttagattgcactcgcgagagacgattggtggcggccgatgttgctggagctgatttgaaatgatcgattcagagcagcaacgaaaccaaaaaagaagatgaaatcgattgatgaagaatgctgcagacagattaatgttgatttgatggtgcaaggaaccaaaactgtattatgatagctactatatctctatgccaactgctagcatttgc

SEQ ID NO: 912 - DNA, 479 bp, Musa acuminata
  misc_feature (4)..(4): n = any nucleotide
  misc_feature (20)..(20): n = any nucleotide
  misc_feature (452)..(452): n = any nucleotide
aatnggaaatgtaatgggantagggattcaattactaaacttgttgctgatttgaatgatgcaaagttggaaactgatgtagatattgttgtagcgcctccatatatctatattgaccaggtcaagcaatcattgaccgatcgtattgagatatctgctcagaattcctggattgggaaaggtggagctttcacaggagaaatcagtgcagagcagttggtagatattggttgcaagtgggttattctaggccattctgagcgcagacacgttattggtgaggatgaccagtttattgggaagaaggctgcatatgctttgagccagaatcttaaggtaattgcttgtataggagagaaacttgaagagagagaagcaggaaaaacctttgatgtctgtttccagcagatgaaagcgtttgcagatagcatatcgaattgggacggatgtcnttaatcgcatatgagcctgtatggggc

SEQ ID NO: 913 - DNA, 773 bp, Musa acuminata
  misc_feature (5)..(5): n = any nucleotide
  misc_feature (8)..(8): n = any nucleotide
  misc_feature (53)..(53): n = any nucleotide
  misc_feature (59)..(59): n = any nucleotide
  misc_feature (68)..(68): n = any nucleotide
  misc_feature (77)..(77): n = any nucleotide
  misc_feature (87)..(87): n = any nucleotide
  misc_feature (96)..(96): n = any nucleotide
  misc_feature (121)..(121): n = any nucleotide
  misc_feature (128)..(128): n = any nucleotide
  misc_feature (752)..(752): n = any nucleotide
tgtcnttntgttgacgttttgaattcacgatgagtttgagttaaattgatcantattantaagcttanactgattanatcatgggtnaaacccagnacattacctggaaccttgaattaanatcatangttgggtttgagtcaaactagtcagacatacacgtaatggaagtcgttgccattattaatagctatagaggaggaaagcataagtcgtcaatgcttatatagaggaagatggcatgagagagggagagggagtctattattcctgcatgtgtgtgtgtagggaaatgggaatggtgcggagtcagtaggtatagcctttgacgaacattccttgcttggattcctccgactcgccttcgccggtgtacttccccagctgagcgagggagttagccttggcgcgcaccagcagagcctcctgtgcttccttcaccttctccggccgtcctccccaggtcttcaggcaggtgttctgcagggctctcgcgtacgagaacgagacgtgccacgggttcggcccctggttcatggcgttcaggttcaaggtcgcctccacctccgattgcccgccggacaggaacatgattccagggacggcgggaggaatcctcctgtgaaggagcttgagggtgtactctggcaactgctccggtgtggccttctccttgcactcggctcctgggagtcaccatgctgggcttgaggaggatcccttcgaacatcacattgttctccgcgaggtanaagaagacctcaccccagact

SEQ ID NO: 914 - DNA, 534 bp, Musa acuminata
cagtaatattctaacggctagcgaaagcgtgtgattccaaattaactacaaaatatttgatttaaaaagagaaaaaaaaaatctgctggactcaacagcccccgtcagtcaaccctcttcaagaaacgagaggagttctgatctcagatccccccccctccacgtcccaatggacgagtagaatatgcccacctactactgcttgcttaaagctcgtcatgtgaatcatcttcgtcaccgccatcggaaccaccgggtgcgccgccggacctctgatacactgcagaaatgatggggttgcaaacagcttccacctccttgagcttctcctcgtagtcctccttctcggcgctctggttgtcgtcgagccactcgagtgcgtccttcagggccgcttctatcttctccttctcctcgttctcgatcttgtcagccagcttgtccttctcgttgacggtgtttttcatattgtacacgtaggtctccagttggttgcgcgcgtcgatcttctccttcactttcctgtcctcctcg

SEQ ID NO: 915 - DNA, 528 bp, Musa acuminata
  misc_feature (515)..(515): n = any nucleotide
  misc_feature (519)..(519): n = any nucleotide
gaatcatattattcataaaccacaacctcatcgtgctcagcacgaagtgaaaggagcacttattcctccctcttacatcatctagcttctgctaacaacatcaacgccattcccttcttcaactctccaccagctgcttcagattgataggactggcgtactccgatgccccaccgtacaacgcgaagccgccttctccgacgtctcttgcgtcgggtgaatcctgtcccagaacaggaactcgttgcggttggtgcagaaggtggtgttgggcgagcacatgacctctgcccccagtttccccgacccacagcaagcactgctcacgtccttgtaaccgactcctgcggggtcagaaactatgtccatgacgacgttgtacgagttcccgaccgtgtacttcatcccttccatctccgagctaagattcttcacgaggacgctgactctgtcgttgaaacccttggtcaaggcgttcaatccatcgaggcacgctcccaagggatgcatgactngggncacggtccg

SEQ ID NO: 916 - DNA, 612 bp, Musa acuminata
  misc_feature (12)..(12): n = any nucleotide
  misc_feature (457)..(457): n = any nucleotide
  misc_feature (488)..(488): n = any nucleotide
  misc_feature (530)..(531): n = any nucleotide
  misc_feature (547)..(547): n = any nucleotide
  misc_feature (553)..(553): n = any nucleotide
acatcatatttnaaccagttccacagtagcgtggataagtagcataattagttatgtgataattggcataactaacaggcagtcatttgagaaagcaaactcattgagccaggcactgaatgagcgaaacaaggtcaaagtgacatgtgtatccgtttgatgtaaagcaattccatattcacaagaaaggagcaagagaacctcgaagaaaattccaaggttataggaccctaagctgtgcaaggaaggaagcacataggtcgagaaagaggagctgcggcccactcaccctctgcaagtcgaggagatacttctcttccctggtcttgtagagctggatttcaaacttgatcgtgctgaattctttcccagaaacattgtcactttcaacaatggcagattcatcgctaacactatggttagcatgcagggaatcattgaacatgctctctgcatnatcagaaatgccaaaaaaatatcggcatttnatgttataatgtccaatctttttccaacaaacatttagttcnngtagagctttaagganctccgncattatttcacgaggatgagctcgagactgaagtccaagagcccattttttctcaacag

SEQ ID NO: 917 - DNA, 513 bp, Musa acuminata
caaaggcttcgtttttgaaaagatgatgagtctcttgagctttttgtatcaagcaaaattattgactatacaacgtcttacaacatcatagtgtaagaataagtataaaaataaataagtcttcggccgacctacgataaaagctgaacagccgcaatggcaggtatcttttctcgcagcttctgagttactgccactcgaacagtcatcaccccggcggcttgccctgttagccgaaccttaacaatgggctcctcgattttgactagctcaagctcaccaccaccggttccagcaaggtatggccttatctcatcaagtaccttctctatattttcttcattcagctgaagaccagtctcctcatcagtgattggttcgacagcaactatatctggaattttttccattaagcgacgctcaatgcccatcttcatcgtcattacagaacttggacaagaaccacatgctccttgtaattttaatcttacaatgttccatctatctcatgaa

SEQ ID NO: 918 - DNA, 759 bp, Musa acuminata
  misc_feature (9)..(9): n = any nucleotide
  misc_feature (11)..(11): n = any nucleotide
acaattttncntcattcagatttaatactgccaacaatatccttgttaagttgggtacaaataccaatattgatatcatagtgttgccatatggattggtcgaaactccagcagaccctgatatcctgtcctagactactggtctcactggcgtaacagcataaatgaaattacagtggcacccaaacttccaagtcagattagcttataattattgatagcacatttagatcttcttaacagtgcaacaagcatgattcttttcaaggaagagaagtgcaaaggacaagtattggaagagaatctcccttacgatggtccaggtggcccttgagggtattgctgcattgcaggtggtgctggtggaggtggtcgggacatcatggactggtaagggggatactgctgctgatacggtggtgggggtggggccatatacccgtatggtggataataatgtggatactggccctgaagatgtggaggaaccataggataagcatgcccctgaacatttggtgcttgctgccctttctgcttttctgatccagttttgtcatcgctacctccctgcgattggattacagcacccatcctctgaggatccatggatgggtagaatgtccgtgcagcttgtggcggtgcagggatgttgaaatagttaggttgttgctgctgatgagtctcagtgcctggtggtagaggttgctggttgctctgctgctgagatattacagcccttgggagcatccctccatg

SEQ ID NO: 919 - DNA, 554 bp, Musa acuminata
  misc_feature (516)..(516): n = any nucleotide
catatatgaagagtacaatcaacagaatcaataaggcgttacaggtcaatgtctcacatcaagggttgttggttagataaggtttcatcaacagtgtgcctcaaaactcaagtctgacagggagcatagatccaagtctagagaagcagaaatgcggagatttaactttatgactgaataggcttaatcttgaagtgcaaagaaatcaaggaaaacacaaagcatttgagatcctgaacaagataatagaagacgcgaaggccctcgggatcctggctaccctggacgtcgacgagggacccgatcttggaagtggtgaaggagatatgctcgttgttcatcacgatctccagctcctgccggccgacccgatccgggggcggccagttattgtcgtcctccctcatgatctcgctgtcggcgatgatgcggcggcactctcggagtacggcgggggagacgaagacctccttgcggatcatggtgtcgttcttgtagttggaattgttggcgtanggagcttggccgtcggggcggaactcgaactccaagaa

SEQ ID NO: 920 - DNA, 338 bp, Musa acuminata
  misc_feature (2)..(2): n = any nucleotide
  misc_feature (11)..(11): n = any nucleotide
  misc_feature (16)..(16): n = any nucleotide
  misc_feature (18)..(18): n = any nucleotide
  misc_feature (25)..(25): n = any nucleotide
  misc_feature (235)..(235): n = any nucleotide
  misc_feature (294)..(294): n = any nucleotide
  misc_feature (303)..(303): n = any nucleotide
  misc_feature (306)..(306): n = any nucleotide
antcagatctntcatntnccctctntatctttctgtctttgatcctttcacaatcagcgcagtcatattaccaagaaggtatgctcccagaatcatatcgaatgagacatagatcatgataaataccatttctctgggattgactgcatgtacatctccataaccaacagttgccatagttacaatggcaaaatataatgatgttacgtagcgcctccaaagatcaatctctctnaaatgtgagtagttgaaatcacccagttgtaagcttcctatccatggtatacccttccnatcgactcnggnagagttgttgccaagtaatagaaaatacaggg

SEQ ID NO: 921 - DNA, 620 bp, Musa acuminata
  misc_feature (14)..(14): n = any nucleotide
  misc_feature (18)..(18): n = any nucleotide
  misc_feature (175)..(175): n = any nucleotide
  misc_feature (218)..(218): n = any nucleotide
tttgcatacatgtntganagtaccacaagattggatcaccagattggggtgtgcttaacgaagcgcaggtcgaccgaggacggaggttaacgctaaacagggactgtcctgccgtaaggagcaggggaggaggtgtcctgctcctcttcgttctcgccggacatttcctccagcnatttgcccttcgactcgggcaccaggaaggtaaagataaggcncacaagattggatgccgcgagcacgaagagcgcgttgcggacgccgatgccggcagggtaccccttgtcccgcttcgtcggatcccggctctgcgccgcgtacaggaatccgaaggcgcccacgatggccccggccttgcccgcggctgccgagatgccgtggcatgtggaccgcagccgcgccgggaagatctccgccggcacgatgaaggtggtgctgttgggcccgaagttggcgaagaagaaggtgaacccgtacatgacgacgaagccgatgtggttgcccgaggtggtccagtgatggtaggggatggcgaggccgagcatgaacacggtcatgaagaagaagccatgagtggatggcgaaccggccatggtgtcatgaaggcgacgtgaaccagt

SEQ ID NO: 922 - DNA, 613 bp, Musa acuminata
  misc_feature (4)..(5): n = any nucleotide
  misc_feature (9)..(10): n = any nucleotide
cccnngacnncgacaattattttgtagttttgacttggagccaactacaggctaatcgacattcctgtcagcaattgcttgaacagtaatattttaaagatctacgttctgacacaattcaattctgcgtctctgaaccgccatctttcacgggcctatgcgagtaacatgggtggctaccagaatgaaggctttgttgaagttcttgctgcgcaacagagtccagagaacccaaactggtttcagggtactgctgatgctgtaaggcaatacctgtggctctttgaagagcacaatgtcatggagtatctaattcttgccggagaccatttgtatcgcatggactacgagaagttcattcaagcgcacagagaaacaaacgctgatattactgtggctgcgcttccaatggatgaaaaacgtgcaactgcttttggtctgatgaaaattgatgaagaaggacggataattgaatttgcagaaaagccaaaaggagatcagctgaaggcgatgaaggttgataccacaattttaggcctggacaatgaaagagcaaagagatgcctttcattgctagtatgggtatctatgtgatcagccaggatataatgtt

SEQ ID NO: 923 - DNA, 603 bp, Musa acuminata
tcccagggctttcattcaggatctaggatctgcaattggaggacggggcgtcttgatgaacgattccaaggcgatggatctggagaagacggagttctcgtcggacggaaagggagcagcggcggcccccgcctgctcgatttgcctcgagctggtactggatcaggggaggagatccaccgctaagctccaatgcgggcatgagttccatctagattgtattggatctgcatttaatgcaaaaggagcaatgcaatgtccaaattgtcgcaaagttgagaaaggccggtggctttatgcaaatggcaaccgttcgtctgctgattttgatattgatggatgggtgactgaggacatatacgatcttggttactctgagctgccatttggatttcagttgttgcctttccgtggatttactcaactggcatcactatttgaggaggctgaatcaatgccgagttcgtatcatgagttcatgagtaattcaatgttccgagaccattcaaattcttcaagtagctcacatatctgcccatacttggccctacatggctttcctaatgcatgcgtgctgcaccattgagtctgctgattccattc

SEQ ID NO: 924 - DNA, 579 bp, Musa acuminata
  misc_feature (6)..(6): n = any nucleotide
tagccnaccaatattttaatgtcatattattgcaaagactcaaaatgcatcaaatgaagagacatgttaaacttgactctaagaattgcataaataacaacttgatttgagcctagaatggacactgactcttatctttaagaatacagaactagcaaacacaaggaatgatagaccacgactgtacaaagattttaaaagcagtgcacaaaaattctctccccttactatcaagttttacttccgtgccgaatggtatagctccatatagtctaaagcaggccgattccaagaccagtcttgttccatcacgcgcttgcatagtgagttgaaccattcccgtgcatcaaaccaagcagagattgctctgttgagagcatagtccacgccagaaggatcagctccctcgaagctaaacccatttggttcaagaccttgcgcatgagctctttctttatcattgtcaatgtcaaagactgtgtcataaagccctccagttctacgaacaaccggaatggagccgtatctcatagctataagttgggttagcacacggtcaaaagtgtggaacaagaatga

SEQ ID NO: 925 - DNA, 560 bp, Musa acuminata
  misc_feature (4)..(4): n = any nucleotide
  misc_feature (16)..(16): n = any nucleotide
  misc_feature (53)..(53): n = any nucleotide
  misc_feature (188)..(188): n = any nucleotide
  misc_feature (323)..(323): n = any nucleotide
  misc_feature (363)..(363): n = any nucleotide
  misc_feature (410)..(410): n = any nucleotide
  misc_feature (491)..(491): n = any nucleotide
  misc_feature (497)..(497): n = any nucleotide
  misc_feature (509)..(509): n = any nucleotide
aagnactcttttagantccttaatccaaacaggaattcgaatcactccccctncagcaaccatgtctttctcaatttcttcttctgattcattttggacgtaagtcacaggaacacttccttgaatatgtacatgaccactctgattgacaggttcaaaattagcattgaagagaaatcgactggttnaggtgattgaagcaacaatttcagcccgtccaagatcaataccccctatagtgccatctaaaagccttatttgaacatcacactcaggctttgcaaggcttcctttaaggtctccttccatgtgcaaaatacctnttattggtgtcaaccattgacgaagagaatgtattgaacntgaggtagaagattcaataatctgaactacagtggggacaaggccancagggaaattaagcacagcaaaatgaagatttgttactggtccaagtagagttccatcagcatggagggtgcatcatcttnctgganaaataatttttncaatcgcaatccatcatgattgctatatgcacagctgccaagatacgctga

SEQ ID NO: 926 - DNA, 537 bp, Musa acuminata
  misc_feature (10)..(10): n = any nucleotide
  misc_feature (377)..(377): n = any nucleotide
  misc_feature (455)..(455): n = any nucleotide
  misc_feature (497)..(497): n = any nucleotide
  misc_feature (526)..(526): n = any nucleotide
  misc_feature (531)..(531): n = any nucleotide
ttattccttngaaaaagatacaattggatttgatgacatcgagaagacaaagaattgttgagatgcttgatgcttacgacaatgacatggccgaggtagcagttgaatctgtccttgaagcttctcatgtaatcggaatagacttggatgggagttcgccccatgagcaccggcaacgtgtcgcagccgagcgagatgtactcggggttgcgtcgtcctaatctgtcggcgtacacgatgtctggatccctcctcgtctcttcaagcacccatggcggcaatggaacgctgcaagagtctcccacgttaccgccacactggtggaaggacatgaccatctgaagcttgagcccgttcctctccaccatctgcgccanctccagatacggctcccagttgtagcgcagggggccgtccttctcgaccagcccccaccacacgtccaccatcacccnctccaccccggcgctgcgagggccatcaaggctggcgttagngccctcggcctctgagtcttccctccggngacancgtgtc

SEQ ID NO: 927 - DNA, 531 bp, Musa acuminata
  misc_feature (5)..(5): n = any nucleotide
  misc_feature (8)..(8): n = any nucleotide
  misc_feature (10)..(10): n = any nucleotide
  misc_feature (17)..(17): n = any nucleotide
  misc_feature (19)..(21): n = any nucleotide
  misc_feature (27)..(27): n = any nucleotide
  misc_feature (35)..(35): n = any nucleotide
  misc_feature (37)..(37): n = any nucleotide
  misc_feature (40)..(41): n = any nucleotide
  misc_feature (61)..(61): n = any nucleotide
  misc_feature (71)..(71): n = any nucleotide
  misc_feature (148)..(148): n = any nucleotide
  misc_feature (231)..(231): n = any nucleotide
  misc_feature (234)..(234): n = any nucleotide
  misc_feature (338)..(338): n = any nucleotide
  misc_feature (479)..(479): n = any nucleotide
  misc_feature (484)..(484): n = any nucleotide
  misc_feature (521)..(521): n = any nucleotide
tatanttncncccctcnannntcctgnctcaattnanaanncttactgacaaagtcaagtnctcgcatcangatctctcggtcccatcaaggagcgcactgctggaagacatctttaacccaacctaacaactcggatgttctgtggnatgcttggcacctgaaaagcatctctgtatggccaacttccgctcttaacagactgacctgtcccaatttggccaacccgcanggnacaatctgtgtgagtccagtgtgtgcatgtatcacatccaatccagcggcatgtattcacctcaaaatcaaacttgttgcagatcacacacatacagagattgnagaaaccattcatactggaacatatctcacagctgcattcatctgcagggagagcactttgacaagcaatgtttctgcacctcttgtacaagaaaacctcgatgaggcgactctgtggaatgctgacgcttggatgaaganggccngaatgcctgaattgattgcaacaagaatttccagttncacacgatga

SEQ ID NO: 928 - DNA, 508 bp, Musa acuminata
  misc_feature (94)..(94): n = any nucleotide
  misc_feature (96)..(96): n = any nucleotide
  misc_feature (101)..(101): n = any nucleotide
  misc_feature (104)..(104): n = any nucleotide
  misc_feature (115)..(115): n = any nucleotide
  misc_feature (118)..(118): n = any nucleotide
  misc_feature (465)..(466): n = any nucleotide
acgctccatacaattccattagtcttacaggcagaactcataaaactattgctgccagaaacagcaagcataaatctgaagatattgtttccangncttantgnacatttattanggnattaggaacggaagatgacaaaattggccaaccctaacagatggatacatgcaaaagatgcttgaagaaggcaaaatctataccagggtctccatttgtcacttgatgcgagcaactgctgcatgaatggcatcagcaagatgagggacagttttggagctcaaaccagccatgctgatcctcccatcagaagtcatgtaaatatgatactctttggtcatgaaggtcacttgctctctattaagccctgtgaaagtaaacattccaatttgtttgatgatgtgactccagtcaccaggcgtccctctagtacgtaaagcatcaaagagctgttggcgcatcctgannattcgatcagccatagctttcaactcaatagtccattcgtgg

SEQ ID NO: 929 - DNA, 482 bp, Musa acuminata
  misc_feature (461)..(461): n = any nucleotide
ttaatcgtgaatgtaactctgacagaaaaagaatccctaggatcaagttcatagatctcataaaagtatacgaattgttcatccaagcaaaaagaactgaaaagatatcgctccgatgtcggaaaaatgtgcctcttggattccttaactgataaatcagtttaggggcttagctctggttgttggatcttctgtggattccacccatatcataaaaacatatcccagaatccagaggaaaatgtactggaaagggacccaacataagcatgccagtagactcaggatgcttccaacatattgcggatcctttatgtacccaaaagggaattctgtaacccaggggatattcttgccgaatcgtacaccgtaataagtgcctgcctcaccgagcaactgatacaccttgaagttgaggagtggccgagaaggaagaggtcggcgagcttggcgggagggangtgagggcggcggccagtgag

SEQ ID NO: 930 - DNA, 479 bp, Musa acuminata
  misc_feature (354)..(354): n = any nucleotide
  misc_feature (361)..(361): n = any nucleotide
  misc_feature (412)..(412): n = any nucleotide
  misc_feature (442)..(442): n = any nucleotide
  misc_feature (447)..(447): n = any nucleotide
cgagcagcattaaggaaggcagagcagcatctgttgagcatcccatcggacacgccatactcggaattccaccacagattccaagagcttggcttggaaaagggttggggtgacaaatctcagcgtgtgtacgagaatattcacctgctactagatcttcttgaggcccctgatccgaccaccttggagactttcctcggaacaattcctatgatgttcaacgtcgtgatcctttctccgcacggctactttgctcaagctaatgtcttggggtatcccgacactggtggtcaggttgtctacattctggatcaagtccgtgccttagaaaatgagatgctactgaggatcaancgccaanggcttgatatcacacctcgaattctcattgtttccagattgcttcctgatncagtaggcaccacttgcgggcagagacttnagaangtccttggaactgaacacacccatatacttcg

SEQ ID NO: 931 - DNA, 448 bp, Musa acuminata
ctacgtatatatatagttttaatgaacgaaatctggtatgtgttttacagttttacatgcatccggtgcacagtaactactgaggtttattgctacagctcggaagacaaaaaaattgtgagggggggtaattttgagcttttgacaactaacaagcaacttccatctgtctaatgatcagctggctgttgagcatgtatatgaatgcaaaaccccatgcagtccacttaaagcattctattctggaagtcattaatgaaaccagaagctaacgatgacagcttcttcccagtctccccagctatgttcttgagcgatgatatatcttgtgatgcctggaatgagattttgttgatgaggtctgcagcagtcaactctactccagaatcagtttcatgaccaaaaagatccgcgctcgatatggatgttgaccccgtgaattctctag

SEQ ID NO: 932 - DNA, 440 bp, Musa acuminata
  misc_feature (26)..(26): n = any nucleotide
  misc_feature (418)..(418): n = any nucleotide
taagacaaaaactcatgaaggaagcntccttctagatctcggacatgtgaacaaacagatagacttgccggtgatgcttctcgcttggaactacttagcgccattaaatgcagcttctccatcagctgccaggggtacagactcggcaaattgcgatatttgagggcatagaacatctcaaggtaacggcgagtctcgcgcctatccaggttggacacatacttccagaagccataaactcccgacagtgtcatcagcctctcagagtagagcttccaggtatacttctcttcgatcctccgcagccctccttgggaaatcttgtcccagtaggttgggtcttccttgcacttcccaaagaaatttaagatgatattagcagctttgtcaccctggtaaggatcgatgtggaaccggnaacccatctacgtaattcaccg

SEQ ID NO: 933 - DNA, 799 bp, Musa acuminata
  misc_feature (10)..(10): n = any nucleotide
  misc_feature (642)..(642): n = any nucleotide
  misc_feature (658)..(658): n = any nucleotide
  misc_feature (665)..(665): n = any nucleotide
  misc_feature (683)..(683): n = any nucleotide
  misc_feature (685)..(685): n = any nucleotide
  misc_feature (694)..(694): n = any nucleotide
  misc_feature (712)..(712): n = any nucleotide
  misc_feature (715)..(715): n = any nucleotide
  misc_feature (717)..(717): n = any nucleotide
  misc_feature (734)..(734): n = any nucleotide
  misc_feature (790)..(790): n = any nucleotide
  misc_feature (795)..(795): n = any nucleotide
tctgctttancgcggtcaataattgcagcccaacttccaggaagaacagacaatgatgtcaagaactactggaacaccaagctacagaagaaactattcggcaagcgaaaagaaccacccctccgcatcaaccatgttccaaccctacctgcatcagctctcgagaggatgcatctccaaggcctcctcagctcccccttctccttctgcagcaaccctgagccatggcccaaccaccagccaccaggagacagatcaattctcccaagcatctccacagactctacgcatcaagctggtttccaaatgagatctggcatcttaaagtccgagagcgcaagtacacgaggagaagtagagcgttcagcgctagggtttcactcggcttcaaccggaggaagcctcagcgtggagacttcaacctcgagcttcgatgctgtgactgcagatcttcaagctgatgagctcgatgacttgctctactgcaaccactcctcgtccttcgcagggcatcaagagcacgagctcgctggcttagactgttgcagagaagtgtacggtgaaaaggagagcacagattggtggattgtcgacggtttcgaggatgagtcgacgatggtgtcttgggattcagcttcagcnctcggttcacaagagnacgacgnttagggatttgcaagaancnatatggtgnccaagaacggtgtgcaanctncntggtagtgttgtcccanttgcgtgtgagtttgtccatgttaggttgcctctcgcattacatctgatggggaanggaancgtt

SEQ ID NO: 934 - DNA, 656 bp, Musa acuminata
  misc_feature (636)..(636): n = any nucleotide
ggatcattcctcgtccatggcaatgccgctaccaccataataacattgtccacaactaatcccacacacgcacacatatctatcaagaataaaaatgctaaaccgaaaccaaaaaccaacccttatgctactctgaacaaagattctaagtattcgaagaggagagagaagcgtcggatttcaatcccacatattacagacactaaaatcaacggagaatgggaaactgccgccttcttcaaccaccaacggaggaattgcctaaaaggatgcgaggagccaaccgtgcctccttgcatgctccacatacagcaggaacttttgctctgcgtcggaaatgtccagagccaaatcatcaagaccatctctaaccctagagagccctttagtcatttggttgatggtgatcagcccttcaccaaaacattcctgcagcaactccaaaagtctgtccttcttcttctccatggccataactatagccttctttaccacctcatggttgaagaaaggcattcccagatcacggatgcactggcatgcttctcctacatcacctccactgtcgtattcttccagcagtttattatcttgtcttggcatctccaccgccagccagtgcacggcccagcatcnagaagtctctgcctgagtgt

SEQ ID NO: 935 - DNA, 367 bp, Musa acuminata
  misc_feature (358)..(358): n = any nucleotide
ctgaaaagagatttttataccactactattcacccaaaacaagcaacaacacacatcgatccacagacacaaacatagagcacaacgcagtgttgacactcctcttattggctactccaaacgtagttctcctggcaagtagtaggtcaagaaaacaaaggagaaaccaggaaggtcatggtaagatgcacgccaacgtagtaacgacggtgatgagaaacaggtggaggggcttcttcagcagggcttcctgcacatgcaccggcgacggacgccctcgcacttgccgtcggggaagccctcgccctggcagacgctggcgcagttgctgctcctcacgcacgtccccttgaacctngtgctcgcc

SEQ ID NO: 936 - DNA, 488 bp, Musa acuminata
  misc_feature (13)..(13): n = any nucleotide
  misc_feature (445)..(445): n = any nucleotide
aagatcagtcatntatccaagtaaaacaaaatgcatgagggataacagacctaaaccgtaaaagttgaaggcataaaccgccccccaacttattaagcaacatcttaagcagcaaaagattaaagatccccccggaccagcattagtttgaacttaatgcgattgtttaaacactcatcgggtagaataaacaagcctgatcagtacttgtagtccttgacatggaggctctcggagacaccttctcctccggcagcatcacccttgtacgtcccgagtgttgcctcggagttcgccttgcaccttgtgaggagagcggccctcgccttctggacgttctcctccttgccagcccacgccttgagcgtgctctgctgcagagcgcggccgaacgaaaaggacagcgaccatggtttcttccccttcagcttgttcattgcgttcnggttcagagtagctcctcttcgctctgccctcctgagaggaag

SEQ ID NO: 937 - DNA, 566 bp, Musa acuminata
  misc_feature (58)..(58): n = any nucleotide
  misc_feature (438)..(438): n = any nucleotide
gcagaacatgtcacgatttagaacttatagaaagaaaaacaccagatatttcgcaagnaaacaagagtgttctcaaattccatacccagaagaacgccgtggagaacaaagcaggataaacataaattgcctaatccctagtaacagagggaatgagaaaagcagctaatcatgcagtcttgggcttgattttctttaccctcgagtagaggaaaactccagcaagtgcgatgccggtaccgagtgaattgatgggggaaactggtgtcctgaaaaagaggactgaagtcacaatgaccacgacccgcttcacacagttgccgacggagtgggtaacaggtgatacccttgctagtatcatgtatgaaacctgctgataagcgtgaaagcacagtgctgcgagacaagatctcatgtatatctctttaagattcaaancagtggactgcagatatgaaggggtaaacttgatgccctccacaaacaaagttgcaggagctaggaggaaaaatgacatgatagttatcatggagagagatttatgttgtcaacgattcctctttctt

SEQ ID NO: 938 - DNA, 646 bp, Musa acuminata
  misc_feature (632)..(633): n = any nucleotide
gtatgatcctgatggcatcaagaaaaaggatcgggtggacggaagaacaaaatggcgcatcaacattagaagaaacaccacatgaaggacaacttagattctaatcaagttgcgacagtccttattaaagggaagtggaacaaggaaatctaagcaagcatgtctgatgcgctttcgaggagttgcatggcctccgacgcattcggcaacgacgggatcgctcccttcttggtggtggtgattgctccacatgcattagcaaatcgcagcagctccctcagcctcttctcgtcctgcagaacagactggtcatggacgatcctcctcagcagtgcaccgacaaacgcgtcacctgccccggtcgtgtcgatctgcttgacggcgaaggagtcgacgattccgtggaaatcctcggtgtagtacttgcatcccttctcgccgagggtgaccaagaggagcttgagggttgggcgccagagttgcatggccacttcatcttccaccgagtcttggccggtcaggaactctagctcgacgtcgctgaccttgatgatgtcggcctggtcccagatgctcaagatttgcttcctggcctccgccgccgacggccacagatgcagccggaggttggnntcgtaggagagca

SEQ ID NO: 939 - DNA, 593 bp, Musa acuminata
  misc_feature (293)..(293): n = any nucleotide
  misc_feature (297)..(297): n = any nucleotide
  misc_feature (323)..(323): n = any nucleotide
  misc_feature (330)..(330): n = any nucleotide
  misc_feature (335)..(335): n = any nucleotide
  misc_feature (339)..(339): n = any nucleotide
  misc_feature (352)..(352): n = any nucleotide
  misc_feature (356)..(356): n = any nucleotide
  misc_feature (376)..(376): n = any nucleotide
  misc_feature (396)..(396): n = any nucleotide
  misc_feature (433)..(433): n = any nucleotide
  misc_feature (535)..(535): n = any nucleotide
  misc_feature (573)..(578): n = any nucleotide
  misc_feature (582)..(582): n = any nucleotide
caatgcaatgacaacattgaactatagaattctctgtgacagaatcttcctcaactaggttagtcttagaacacttaagaagcaaaagaagtaaccttacctgccaattgctccccgagccctaatgcagcagcgagtttagccatgtctttcctggaagcatgctccagaacgagcttcttcaggaagccttcttcgaatcgtgatctcagaccaaacgccaccaccatctgcagaaatatttgcgcctctgaaccacccatggttcatccttctcatcctcctttctcctnctancatggcttccttctataatggccttntcgcggntggcnatcntctctctgctagngagncgcccgcccaggctaagctntcgccggcccatctacgccntgacgtgccccgacctggagagcagtcgtgcggtcgntcatggcgcaggtcgtcggccaggatccccggatgggcgcctccgtcattcgcatcttcttccatgactgcttcgtcaacggctgcgacgcgtccgtcctcntggatgacacaccgacgatgaggggcgagaagaacgcnnnnnngggnatggggccaaa

SEQ ID NO: 940 - DNA, 754 bp, Musa acuminata
  misc_feature (25)..(25): n = any nucleotide
  misc_feature (155)..(155): n = any nucleotide
  misc_feature (189)..(189): n = any nucleotide
  misc_feature (191)..(191): n = any nucleotide
  misc_feature (193)..(193): n = any nucleotide
  misc_feature (210)..(210): n = any nucleotide
  misc_feature (217)..(217): n = any nucleotide
  misc_feature (225)..(225): n = any nucleotide
  misc_feature (232)..(232): n = any nucleotide
  misc_feature (265)..(265): n = any nucleotide
  misc_feature (298)..(298): n = any nucleotide
  misc_feature (321)..(321): n = any nucleotide
  misc_feature (344)..(344): n = any nucleotide
  misc_feature (367)..(367): n = any nucleotide
  misc_feature (379)..(379): n = any nucleotide
  misc_feature (403)..(403): n = any nucleotide
  misc_feature (710)..(710): n = any nucleotide
gttgttgtcgtaccgggcggaggantccccttacagcactcatttggacgaatcttagaatggggagcttctggctgttgagggtggtgatccttccagcgcgcggattgaagtagtcagcacgcaagtggtgatccatccagagttcaactcangcaaaccatcagtttgagctcaacattttgttangncnaagtcttggcactgggntacatancttggagntaggctngagaagcagggcacctgctcaaacccctctgantagaaaggggtttggccaaaggtgatgcagttntccattagagctgagagggactntgaacccgagttttcatggcttncctccatgcttggcatggtgganatccttctgttnttgcagaagactctacatagggcncagtcttgaaaggcaactttggagcaccatcagatccttccatgcggaattcatgcatgacccactttgtcttcttccccttgggagctcttccttgatagaacgccaaagtcttcctcatcccaaccagcaatccttttcgggtcactggtttatccttccctgtggccttccagtagcctgacatggtcgcccggttggtccgctgcccggtcgcgtacttcagatctcgaaggctgaagaggtaccactcgttgctcccaacacatgcggcagcagggagatcccatggctcacacttgttganatcaacatccaccatcatcatggaaccgctctcggtgctgcctc

SEQ ID NO: 941 - DNA, 498 bp, Musa acuminata
  misc_feature (4)..(4): n = any nucleotide
  misc_feature (78)..(78): n = any nucleotide
  misc_feature (131)..(131): n = any nucleotide
  misc_feature (156)..(156): n = any nucleotide
  misc_feature (167)..(167): n = any nucleotide
  misc_feature (179)..(179): n = any nucleotide
  misc_feature (422)..(422): n = any nucleotide
  misc_feature (424)..(424): n = any nucleotide
  misc_feature (433)..(433): n = any nucleotide
  misc_feature (452)..(452): n = any nucleotide
  misc_feature (483)..(483): n = any nucleotide
tcgnctcctcttcctcttctccgatcccctcacgtgttttcttcgacaaagtatttatagacaatggccgaagctgancgatatccagcctgcttgtttgtgacaatggtactggaatggtcaaggctggntttgctggtgatgatgcacctagancgtgtttcccngtattgttggcngacctcgtcacactggtgttatggttgggatgggccaaaaagatgcttacgttggtgatgaagctcagtccaagagaggtatcctcaccttgaagtatccaatcgagcacggaattgtgagcaattgggatgacatggaaaagatttggaatcacaccttttgcaatgagctccgtgtagctcctgaggagcacccgatccttttgactgaggctcctcgtaaccccaaggctaacagagagnanatgactcanatcatgttttgaaagtttnaatgtgcctgcaatggtatgttcggcaattncaggcagtccttttc

SEQ ID NO: 942 - DNA, 343 bp, Musa acuminata
  misc_feature (138)..(138): n = any nucleotide
  misc_feature (204)..(204): n = any nucleotide
  misc_feature (214)..(214): n = any nucleotide
  misc_feature (284)..(284): n = any nucleotide
  misc_feature (314)..(314): n = any nucleotide
  misc_feature (327)..(327): n = any nucleotide
aagtattatgtcaacaatatgttccagaaaacaagcatatggtacattagcaccgcatctcaatcctttcgggcaatcaactcatctcactaaaaagaagagcaaatcatcaagcactaagtttcagcatttcttggncaagccacccatctgcaaacccaaacgcaaacaaaatgacgtgaataagatccatactcgtattangagtagactnggagcgccatcatctccggggagtggagtgctcgtcggaggagcatccacagaccgcagccacggtctcnacctctctcctgtggaagctgcggtggcantcacaggcggcgnaccggagggcgtcgcc

SEQ ID NO: 943 - DNA, 551 bp, Musa acuminata
tatcttttgtgatttcctcagactacaatgcatgtgtcctctcctggatcaccttcactccaccattgacgtcacacagacatatgagctaacactagtcgaccaaagtcaacgaaagagaggaagcgtcggggtggcagtcctctcaagcctctgtccctcaagagaggatggagtgcagatcgttaggtcgaggttgagatcaggcaacacagtggagctgcacttcttcatgttctcgtggcttgtcacggcatcagtcgacagagatgcactgtgtgagctccgagatcgacggagcggcgccttctgggtcaaccggtggttgtcaggatcgacacccatgctcttgagcttcttcctcaggtgggagttccagtagttcttcacctcgttgtccgttctccccggcagcctcccagctatcaacgaccaccggttgccgagcaacgcgtggagttgatgatgaggtcggttcatcctctttaaagttgcttctcttcacgtccggacgaaggtagttgatccaccggagcctgcaactctcgccg

SEQ ID NO: 944 - DNA, 570 bp, Musa acuminata
  misc_feature (5)..(5): n = any nucleotide
  misc_feature (7)..(7): n = any nucleotide
  misc_feature (12)..(12): n = any nucleotide
  misc_feature (27)..(27): n = any nucleotide
  misc_feature (29)..(29): n = any nucleotide
acatngnagtgntaagatttatgttananttatagtcacaaaaatactgagtcacaaaaatactattaaaactagcagattgacacagactatctgcaattagagaactgtctgtggtaattgaaatgaagcaactgttcaatccagagggatgacataggcaagaaacacttaaatcagacaccacaacaaatgtacaggttggagtttcatgaatgatggtaccctgcagttatttggaactcaagaagccctcttgcttttgtacctattagcacaggcaacatatatcaaaagattcaagaagctcagccccgtgagcagccagaagtagtagtcgaggtgcccttcgttcaagttatcgggaatccatcctgtcctcccgcctcgagttgttaccgatgtcacgacagtcaagatgaagggactcaggtagttccccagcgcagtggtaagaagtgataacgcgctgcacagacttctcatagcatcaggagactgatcatagaagaactccagtgacccaatgatgtgaatacttccgtgctccgaccaaaagtttgaggtgtc

SEQ ID NO: 945 - DNA, 599 bp, Musa acuminata
ccacattaatcatcagttcatctgctccgtaaagctcacttacaagtggatgagaagactagagatcctagagtcaatagctcaaagattatttagactttggcttccgaagaaaaaaaaagaggagactcgaggttttgtacactgatacagagaattttgatagtcctctcgtccctatggaagtgatctgctagagctggtctcctctccggtactgctggatccatcggagtgatctgtgacgcagctcgagccggatgaacatgatgtggaatgactttgatcgccacctctctgccccatgaaatcaatgaagccatcacgtgtgatggggtcttcgtcttcttcaccagcttcatcggttccgacctccatcttggtagcccttttcttcctaaaaatgcgacagagcacccagtcgccgctcggatctaccgaactatgagtcgagttctttctttgggggaagatgcagggtctagtctcaggtccggcgagccggtactcatgcatgatccagtcggtcttggtccccgtcgggggctttccccggtagaagaccaaaaaccttcctcatcccgacgaccaacctggct

SEQ ID NO: 946 - DNA, 539 bp, Musa acuminata
attctgtaatagcaaatgtctcaattgcatgaactgagaattctaaactagaagtgatataagagagcagatcacagtaaaccaataaaattgtacttctacacaaaggaggagttcagcttcttgagattgcacaagttcctgatgctcatgtgaacgaattcaagtcaattgaaaagtttaagatcttcaatactaacaatctatgggtgaacttgaaggccattaagcgacttgttgaagctgatgcacttaaaatggagattattccaaaccctaaggaagtagatggtgtaaaagttcttcaactggaaactgcagctggagcagcaattcgattctttgaccatgcaattgggattaatgttcctcgatctcggtttcttccagtgaaggcaacctcagatttgctgctagtacagtctgatctgtatatgttggttgatggttttgttattcgcaataaagctagaacaaatccctcaaatccttcaattgaacttgggcctgaatttaagaaggttgccaacttccttagt

SEQ ID NO: 947 - DNA, 412 bp, Musa acuminata
cgtacttcattcacaacaggtatccctcatcagagagagagatgaagcatgcactaacacaagcaaagttgagtaaaatatcagcttatgcagacaccatttattcctttacggacaaattaactccgacaccgaaggcagacatcgatcactttcacggggtggccatgttttccattgcgagaggagctatttcctccccatcaatgccgggctcgctaccggtggctcctaagctcatgagaaactgctcccacttcttggcaggtcccttccaggagaggtcctgtttcatgcagttctgaatcatctgggcgaaggccggagtacggtagacattaatggcccttttcacagttttcacaactttttctatgtcctccttgtcaacgacattgcactgcgaagacac

SEQ ID NO: 948 - DNA, 634 bp, Musa acuminata
tcatcattttgctctaataatccactttaggtttcacaattgaaacaacaaaatcactcgatctaacgaagcacacgtatccactaactgcaaatccatccaacgaaaatgacacagtcactctttcgaagacttgttaatgagggacttgtgaatgtgggggatgactccaccaccagcaatagtgcccttaatgagagtatcaagctcctcatctcctcgaatggctagctgaaggtggcgtggagtgatacgcttcaccttgagatccttgctcgcattcccagcaagctccaacacttctgctgtcaagtactccaatattgctgctgagtagacagctgcagttgctccaacccgaccatttgcttgaatcctcaacttcaattgccgatggatacggccaacaggaaactgcaaaccggctcgggcagaccgggataccggcttcttcttgtccttgtccttgttcgccgccgtcgtccttgacggacatgagtcccttgatcccaccgcagcggctgtggccgatcaccattatgttctccaccttgagatggagcacagcgtactcgatggcgggcccaactccggcgtacttaacctggtcatagggagggaccatgttggcgcg

SEQ ID NO: 949 - DNA, 456 bp, Musa acuminata
aattattgtctctttatgcatgataacacaaaggatcgaacatgaagataatgtattcaaacaacaaacataaatgatcagctatgtacagggctcataaacagcaatttgggattcatgcttttacaggaaccatgcctgtcatctccttcttccttcgaggtcggaatagtgaacacagcctgaaccagcagccctttctcccggccgccccagcccgctcgacactcctcgtcctcgctgaaaccaactcggccatgtactgaacaactgcctgagctcccaactttagcacatgccttggtggcacttccagaggagtttcatctgcattgaacaccctaagctttgtcaagagctggaaagaatctggcagtactcttatctggttgctgtgatgtccagtcttctagcatctctagattccccattgatcctgggtaatgccgtcaaatc

SEQ ID NO: 950 - DNA, 669 bp, Musa acuminata
  misc_feature (5)..(5): n = any nucleotide
  misc_feature (8)..(8): n = any nucleotide
  misc_feature (11)..(11): n = any nucleotide
  misc_feature (13)..(13): n = any nucleotide
cgaanggnatnantaggaaaaatagaagctttctttagacgggacacacatacagactctttcctgggcagtaacacactcatccatcaccagcagccacagcaatctgcatttgaaatcgaaattatttgtttagctacaactcaaaacattctcttgagatcacagttggttcctgcttcatgatcaccaaagaaatgctgacagaacaaacaacattattctatgttcggtctacaaatatatctggaacaggaaattgttgctcaactctctcaccaaaatctactactctacatccgattgctattgcagcagccatgcaaatgtagagcaccgatccctattcactgcttggcctgggaatacaagaaagttccaaggatggcaatggcagctccaagtgcattgatgggttggacaggtgtatggaaaattatgatggaagagacgatgacagatatccgcttcatagtgttgccaatactaaacgtcaaaggagagatttcatccaatgacatgtaggagacttgattgtacaagtggtagaagacactctgggcagctacccaccagatgaaatggggaccaatctgtgaaagcgccgtctgccagccagcagcccacatctggggaccctcgatcgcaatggcaaatggtgtgagtatc

SEQ ID NO: 951 - DNA, 585 bp, Triticum aestivum
acgacggcttcagctggaggaagtacggtcagaaggacatcctcggcgccaagtacccaagggcctacttccggtgcacccaccggcacacgcagggctgctacgccagcaagcaggtgcagcgtgctcacggcgacccgctgctcttcgacgtcggtgtaccacgggaaccacacgtgcgtgcagggcaagcacagcaacagccagacgccgcagcccgcagcaagcggagagcaccggcagccgcagcctgcaggcggacaggagcggatctccgttggacagaagaccgagggcggcgtggcggctccgttctcgttcccctccaaacaagcaggcgccgacacgggcagcgacttccaggccggctgtgccaccactgcatcccccttcatgtcgccggcgacgtcagagtgcaaggcctccacgacggaatccccgatgggggacatggacttcatgctccagctggccgacgccgatttcttggacaactcgcgctatctctaagtctccgcaggactactaggcaacgaattatgagttcaggatgctagcttcgagcttgtaagattttaagctgat

SEQ ID NO: 952 - DNA, 979 bp, Triticum aestivum
gggaggagtccatggagatgagcggccttcgagctgtggaagcacgagaagccccccaagatcttccccatgcccccgccgctgccgccgctgctggcggcggccggggcggggggctacgacgaggccacgctcgtgccgccgctcaacttcgccatggtcgacgacggcatctaccgctccggcttcccggccgccgccaacttccgcttcctcaagtccctcaacctccgctccgttgtgtacctctgcccggagccgtacccggagaccaacacggagttcctcgagaagaacggaatcaagctccaccagttcggaattgagggccgcaaggaaccattcgtcgagatacccgatgagaaaatccgggaggcacttaaagttgtcctagatgtaagaaatcaacctttgcttattcactgcaagagaggcaagcaccgaactggatgcgtcgtcggttgcatgaggaagttgcagaaatggtgcctgtcttcggtcttcgatgagtaccagcgcttcgctgctgcaaaagtgaggagcaccgacctgagattcatggagctgttcgacgtctcgagcttgaagcacctgaccaactcacattgttaaccaagggcgagtgatcgctcgccccgccgtcctccctgattctagtacatccctccggcggtcactggaccgaatcagcagtgaataatttttggaacccgtagaatgaatccatgagatagtgacgagacctctgcaaaaaaagaagattgaagaagaacttgagagctctattttttccctgctcaggtccctgcagatcctaagaaccagaaagttgtgggtaggattgcaagaggttttctttttcttcggttactcttgcgatgaattcaacattgttttcgggtactgaagctctgtactcgagcagcattgctaggcagagagcttggctcttctttacatgaatgcatctaaattgatc

SEQ ID NO: 953 - DNA, 689 bp, Triticum aestivum
ccagagctcggcgtggcgcatgaacaggcgctgacgggcgagcagatggtggcgttccaggaggccttctcccctcttcgacaagaacggcgatggatgcatcagcttggaagagctgccgcggtgactcgctccctcggcctcgatccgaccaaccaagagctcaatgacatgatgcgtgaattcgacatggatggaaatggcaccattgatttccaggagttcttgagcctcattgccaggaagatgcaggatggagatggagatgaagagctcaaggaagctttcgaggtcctggacaaggatcggaatggttttatctcccctgttgagctgaggacggtgatgatcaatctcggggagaagatgaccgacgaggaggttgaggagatgatcagggaggcggacactgatggcgacgggcaggtgaactacgacgaattcgtgctcatgatgaagaatgccgagcgcaagataactgggtgaacaaaattaaatatgctgtttgctctaaaaatatatatgctggcgatagatgtgaaaccactggttctcagattggatgcactgtctccgttgtaaattcgctgcttgtggtactgttattttctgaagccactgtaagcttgtgtattcatcttagaagctgtttgtgcactatataaacggcaattgccacatatatttac

SEQ ID NO: 954 - DNA, 874 bp, Triticum aestivum
gcagatcgcctcgctcaacggcaacagcatcacgtccagcttctccatgctgcacgcctgcaccatgaacaatgacaccgcggaggagagcggcggcgacagcgtgttcgccacgctgcactcgatgtgggagcgcccgtgggcgctccggaggctggcggcgatcatgacagccagcttcggcgtcggcatggtctactacggcatgccgctcaacgtcggcaaccttggatccaacctctacctgagcgtcacgtacaacgcgctggccgagctgccgtcgtccatcctctcgtggctgctgatgggcaggatcaaccgccggagctcggtgatcgcgctcaccggggcggcgggggtatggagcctcgcgtgcgtcgtcatcccgcagggcgcggcgcggatggccgccgagctgctctccttcttcgcgacgtgcacggcgttcaacgtcatcatgatgtactccatcgagctgttcccgacgtcggtgcgcaactcggcggtggggttggtaaggcaggcgctggtgctgggaggcgtggcggcgccggtgctcgtcgcgctgggccgcgagaggagcttcttgtcgttcggcgtgttcgggctcgtcgtcggctgcttcggcatgttcgccgcctgcctgccggagacgcgggggaagggcatgtcggacaccatggacgaggaggagcacaaggaggcggcggtggccgcttgcaccgtcgacgatgcggactgtaacagcgacctcgtgtaattaaactaaactgcggattgatgtacaaagttaataccatgctcccattccaatcaagtcaattgctgccaggtcgcagcacattactgaacccaacacgtgagaactagtact

SEQ ID NO: 955 - DNA, 623 bp, Triticum aestivum
gggaaggtttccgtcatacattggcactactacacatgttcacacccatccgagctgacagccggctactacaacacattgctaagagacggctatctccccgtcgcccaaatgttctctcgacacagagctgccctgtgctgcggctgtttcgacctgagggacgaggagagaagcggtcctcagagcagccccgaaggcactctccggcaactgatggctgccgctaaggtatggaacctacctctcaatggtgagaactccgtggagaggctggacgacgcgtcactgagccaggtcgtcagaagctcgaggcgctactcgggcggcacctcgggcgcgtctttctccttcaactatgtcaggatgaacaagagcctgttcgagtcacacaactggaaccggcttacgaagttcgtcaggaagatgtcggatgccagaacctttctggctagactgaacttcaggagacgccaatgtctgccttcaatgtcagttgtttgggttgctagccaggcctatgcatacacctgatttattttgttgttgctgttgtgtgtcaaacatgtatgtgacctgtgatattaaaattgtagacgactcgagaaggaaaaatggaagaa

SEQ ID NO: 956 - DNA, 659 bp, Triticum aestivum
ggtttacatgttgcgtcgaaacgcactcggtcgatatgatgccactgcttacaacactatactcaggaatgcgaggccgaaaggcatcaacaagaatggccctcctgagcacaaactgtttggattcacctacctccggttatcgaatgagctactggagggacagaactatgccactttccaaacttttgttgagaaaatgcatgctaacctgggtcatgacccaagtgttgatccagtggcgcctttggaaagatcaaagccagaaatgccaattgaaatgatcctgaaagcagcgcagccaaaactggagccattcccctttgataagaataccgacctgccagttaaagatcacactgatgtcggggatgaggtgctcgttgcccctgtgtagaaatctttctctatcttcataaaataatgtgcatcactgatgcagtctacaagagggtcaagacgtgctttctgagaattgaggtgcacaggaaataagccgccgaggataaataaactgtgtactacaatgttatagccatatagtctggcaatactattgtactggtaatcatgaggttgtatgcttttccgatgagctgcagttcatcggaactccgtcccactttgctgtgtgtatttgagtgaacaaataaaacagt

SEQ ID NO: 957 - DNA, 900 bp, Triticum aestivum
cctagaggagctcaattgcagattgtatacggcgtatttggctacatgcaggtcctgtcagcatgcttcatgtcattcgctcatggaggcaatgatgtctccaatgccatagggcctctggccgcagctttgtctcttcttcaaggcgtagcaagcagcgctgagatagtcataccgactgaagtccttgcttggggtggttttggaattgtcgcagggcttacaatgtggggttatagagtcatagcaacaattggcaagaaaatcaccgaattaacacccacaagggggttcgcagcagagtttgccgccgcttctgtggtcttgtttgcatctaagcttgggttgccaatatctgctacacatacacttgttggtgcagtgatgggtgtgggatttgcaagaggtctcaacagagtcagagcagagactgtgcgtgaaattgtggtctcctgggtggtcacaattccagttggtgctttgctatcagtcttctatacattaatcttgaccaagattctgaaatactttatgtgagtgctttgtgagaaacagttgctgttttgagaggtccagccgttgcccctaaattttttatgctgtaaaaaaatgtgtaacagtgaatagatgagccagttccgggagtttccagcagtggaattgaaaagatttgtcagagcaaataatcattttcctggcaacaaagcacatgattaggataaaggatttatggtaaataatcatgtttgagactcccagcttcttcatcttttatctctaatgtacacctatatgactatctttatattttataccggaaggatggaatatatcaatttcttgtagagataatgaataaaattgatcatacataatagacacatggttcgtcatcacaac

SEQ ID NO: 958 - DNA, 602 bp, Triticum aestivum
cgccccgacaaatggcatctacggtggttctcctcctcgtggccgcgctggcgtgcgtgctcggcggcgcccgacgcgaagctcggcaggctcgtcgtcagcggcgtcgtgccgtgcaacaccggcagcctcatagacatcgccacctcccccgtgttcccgaacgcggaggtggagctgcggtgcgcggggcaggtggtggccggcgcgacgaccaacaccaacggctccttcacgatggaggcggacctgacaagcgcgctggcggcgttcatcggccggtgctcgctggtggtggacacgccgctcatcaagtgcgacgcgcagctgccgccggcggggaagctggtctcctacctgcagggcccgctcaccaggctgctcggcggcatcttccacctcttccccgcgggcttctccttccacagccgatgaaattagtagttcactgtgtcgtcggtccaaccatctcagcatactgagatctggctaattacctcttctatctttagtttggtttgaaatgaaatgcaaggcaagttacaggagctgcaaacgcttgacgtaagtgttgttgttgtaggttggctaagttgagcaac

SEQ ID NO: 959 - DNA, 797 bp, Triticum aestivum
tctagctgctgcgacagagctgaactttaatatgattggattatgggtgccatgatatcgaaccttgcatttgttttccgcaacatcttttcgaagcggggcatgaaagggaagtctgtcagtggcatgaattactacgcttgcctttcaattatgtccctggtcatactcacaccatttgctattgctatggaaggcccccaaatgtgggccgctggatggcaaaaggctcttgcagatgttggccccaacgttctctggtggattggtgcacagagcgttttctaccacctgtataatcaggtgtcctacatgtctttggaccagatttctccattgacgtttagcattggcaatacaatgaagcgcatatcagttattgtttcgtcaatcattatcttccgtacacctgtccgccctgtaaatgcactaggagctgccattgccatctttggcacattcctgtactctcaggcaaagcagtgaggtttgaactattgttgaaggtcaggttcatggacgaagaatgtctgcagaaatagtaccaagcactggggcaaattttgcttgtgcaagtgtcttgttgatacaggtttaggttttcatgcgagaggcgataataataatggaccatgttgctgtttccttgttatttgttaaatcacaaactgaactccagtggccatgaactgtcgttgtatcctgaaataagaactgcatggaaattcgtctgacagttccgttgctggaaagtaacgatagccctatgcttaacggttaattattgatatttaaga

SEQ ID NO: 960 - DNA, 619 bp, Triticum aestivum
aggcctcaccaagcaacctaacatcaaaccactgaatatgtttttctagagggaagttgcgaactccttagttgccggccaacaaaattccttatgcctaggttcaagttgattagcattgttgtttacgtcgaaaacatagatagtcacaattggcgcatcaccgtcattgtagaaccaatgtacaatgcctgctggtagtgcaatgacatctccttgtctgaaacggtgcactttttggtgctcatctttgaacttttggctttggctttgaccctgtacggattgtgcttgcccatatttttgaaactgtttttggaatgtctctgggcatccagggaaagacaatccggcaaaaccacttccttggatgatgtagactaatccatgagtgttgtggtatcgcggtaacaaataaccatgaggttcgattacacgacggatgacaaatacaccaatacaacgaaattgctcattttcctcatcaaaatactcggtcaggcctgcttgtgacctcacttgacgaagtggtgtagatgcttgtagcctattgaatgcacactctccggaaaccccttggcgagagctttgccatgggttaaactcatgccaaacaaat

SEQ ID NO: 961 - DNA, 1015 bp, Triticum aestivum
gatggaggtcccgtggttactagccagatttattgtacacagcaagttaatgatcagtgatgaccgcattgcattgattggttcagctaacatgaaatgatagaagcttgcttggatcaagggattctgagattggctgtggtcatcgaagataaagaagttgttaattccacaatggatggaagacattgggaagtctggtaaattctctctcagcctacggctttctctctgggcggagcaccttggccttcatcgcggagaggttaaccacatcatggatcctatggatgatacgacgttcaaaaatatctggatggccactgctaagacaaataccacgatttaccaggatgtattctcttgtgttcccaacgatctcatccattcaaggacacagtttcggcaaagcattgcttactggaaggaaaaaattggccacactacaattgatctaggcgttgcccaagaaaagctcgaaacctaccaggatggcgatctcaaaggtgccgaccctatggagagattgcagttggtcagaggccaccttgtatcttttcctttggatttcatgtgccaagaggacttgagaccatatttcagtgaaagcgagtattacacatctccacaagttttccattaggttgattttcatggaagagttgctctcccagtcccttagttgtacatagtacaggcgccagcttgtagatgtttttacaggaaatgaagaaaatatacggccacgtcaggcagtttacaaatataccccattcaccggagttctgtctttttgggcaattacccgtgctcagattcttctttttccaaccaaagaatataggaatatagttagttcattcgacggctctggtttttttaggtgagaaatgcccctgttcagttgacacttttccagtccagagaataggctctttctttaaagctgtcttggttgtacattatgaattatttttgaagaataagtacattctagttggccttgcatgtatgc

SEQ ID NO: 962 - DNA, 583 bp, Triticum aestivum
  misc_feature (485)..(485): n = any nucleotide
  misc_feature (516)..(516): n = any nucleotide
  misc_feature (561)..(561): n = any nucleotide
atgctttcatgggcccttcatgtccaactggagatcctcgtggctatctagactggattccaggcgtttttgcacccctgcgtcaccattccccttagccacctggtggagttcttcttgtataagaggtgccggaacattgcttgccagagtgctctcccggctgaggaatgcagatgcaatgtatgtgctacagaaatgggttttgcaacctttgcatgtgcgtgatttgcaacaagtttgattttgaggtcaacacatgccgatgggttgggtgcgatttctgttcccattggacgcacaccgactgtgcgattcgtgttggccagattgggacagggcaatcaattaagagcggcaccggtcatgccgaaatgctttttaggtgccaggcttgccagaagacatcagaattattcggttgggttaaggatgtgtttcaacaatgtgctcctggttgggatagggatgccttagtacgagancttgagtttgtttgtaagatatttcgtctangcgaagacccaaaaggaagaaatttgttcaggaaatttgcgaatntgattgaaagattgaggaatag

SEQ ID NO: 963 - DNA, 519 bp, Triticum aestivum
ctcgaggccatcgcttggacaggagagagatgcggctctgggaaatggtggcttgggcaggcttgcatcttgctttttggattcaatggcaacgctgaacttgccttcttggggctatggccttcgttaccgttatggcctgttcaagcagcgcattgccaaggagggccaagatagaaatcgctgaagactggcttgataagtttagcccatgggagattgtcaggcatgatgttgtatacccaatcagatttttcggccatgtcgagatttcgccagatggaaagcggaaatgggccggtggagaagttctgaacgctttagcgtatgatgtgccaattcctgggtacaagacaaaaaatgcaatcagtcttcgcctttgggatgcaacagctactgctgaggatttcaacttatttcagttcaatgatggccagtatgagtcagctgctcaacttcactcgagggcacagcagatatgtgctgttctctatcctggtgatgctacagaagaaggga

SEQ ID NO: 964 - DNA, 565 bp, Triticum aestivum
gtctttggtcaacaacagtaccatcacaaaattttgatctgggagctttcaatgctggggatcatgccaaggccaatgaagcacatctaaatgctgaaaagatatgccacgtattgtatccaggggacgaatcatcagaggggaaaattcttcgcttgaaacaacaatatacattatgctcggcctccctgcaggacattatttctcgttttgagtcgagggctggtgattctctcaactgggaggacttcccctctaaagttgcagttcagatgaatgacactcatccaacactgtgcattcccgagttaatgagaatactgatggatataaagggattgagctggaatgaggcttggagtatcacagaaagaaccgttgcatacactaaccacacggtacttcctgaagccctggagaagtggagcttggacattatgcagaaacttctacctcgacatgttgagatcatagaaacaatagatgaggagctgatgaacaacatcgtctcaaaatatggaacggcagatatttcactgttaaaacagaagcttaaagatatgag

SEQ ID NO: 965 - DNA, 731 bp, Triticum aestivum
  misc_feature (663)..(663): n = any nucleotide
gccgggtggagggaggggaccgaggtggcgtgcgagaacgcgctgcccaggtacgaccggcgggcgtacaaccagatgctgaagaacgcgcgtcccaacggcgtcgacctcggcggcgtcccggcgcgccgcctcgccgcggtgacgtacctcaggctcacggaccaactcctggccgggaacaagtaccgggccttcaaaaccttcgtcaggaaaatgcacgccgatcaggcaagcccagttttagcgcctttggcgggctatgagcctgtgacttcttacgacgtgctctgggctgtgtgtttttttgtttcaggattactgtgccgatccggcccagtaccaccggcccctgaagcctctggagcggtcgaggccggcggtacccatggaccagctgctggacgcgacgtcgccggaggagccatacccgttcgatcccgagacggacatgagcgccggcggcgacctcgcggagctcatcgactgggcgttcgacaagatcgaatggatattcggttgaaaatgccgctctttgtaccccacccaggcaaatcgggtcgatacacgcacccttgccgtaactagtaggccaattagtagtaccggacgtctctcagcaatatgtccacgataaagataatccattcgtgggatactaanacaagaagcatgcattgttttttttagaaaagaccatcatgactagttttattgattgaaaataggaa

SEQ ID NO: 966 - DNA, 603 bp, Triticum aestivum
atgtttacatggcgatgatatgccacacaaaagggggcaacacaatacatactgccatgattctatgtcaattattttcgctgggataaaaaagaacatactctgacttgcacagattctgctgcctcatgaccaaattccgcaaggagtgcgagggtcttggccttgaggactttccaacggccgaacggctgcagtggcatggtcatcagcctgggaagcctgattggtctgagaatagccgattcgttgccttttccatgaaagatgaaagacagggcgagatctatgtggccttcaacaccagccacttaccggccgttgttgagctcccagagcgcgcagggcgccggtgggaaccggtggtggacacaggcaagccagcaccatatgacttcctcaccgacgacttacctgatcgcgctctcaccatacaccagttctctcatttcctcaactccaacctctaccccatgctcagctactcatcggtcatcctagtattgcgccctgatgtttgagagacaaatatatacagtaaataatatgtctatatgtagtcctttggcgtattatcagtgtgcacaattgctctattgccag

SEQ ID NO: 967 - DNA, 759 bp, Triticum aestivum
gaagtgccgagcacgaacatagcggcgctgcaacctctccgcccccacgaagagagagaaaaccatggcggcggtcggcggcgcgggcaacggagccggcgaggaggcaggtggggccgagttctacctgcggtactacgtggggcacaagggcaagttcgggcacgagttcctcgagttcgagttccgccccgacggcaagctccgctacgccaacaactccaactacaagaacgacaccatgatccgcaaggaggtcttcgtctccccctccgtgctcctcgaggccaggaggatcatccaggactcggagataatgaaggaggacgacagcaactggccggagcccgaccgcgtcggcaggcaggagctcgagattgtcatgggcaacgagcacatctccttcaccacctccaagatcggctccctcgttgacgtccagaccagcaaggacccggagggcctccgcatcttctactacctcgtccaggaccttaaatgtttcgtgttttcacttatcaacctccactttaagatcaagcctattcagctttgagctatgttgggttttcccggttgtgttatggtactgcgagtgttagagaattctgtacttatgtaatatgccatgagttgcttctgatgcggttgggtgtgcgtggaacactgtgggtgatcccttttggcatcacctgaggttattggattgtgcaagcttcgagtgctcattgatatttatgcatgtttgttttacaatct

SEQ ID NO: 968 - DNA, 714 bp, Triticum aestivum
gctcccacgaattacacttgtcattataagatctggccacaaacgacaaactcacagttgcatttagatggtgaggacccccatgataactaaatccaacaccatcaaaagatatgccaaataatggcaccatcattcctccataatcatcaaaggaaacagcagagaacgtttttattacagcatcaataatgatgttatctgaactgctagatataggggggccagcaagcttcagagcgagtcttcttggaggtttacgaaattcacttctaacaagaaatgtaccggcatcctcatccacagtccataaactaaaattttcagatgttttagagccacgtgagtcccatacgctttcctcagaaaattgacctcccgtcaccatatcacttctaatacatcttaacatactgaaatcctctttcgttggtggacctttagatgcaacacatcctaaagcaacaaaaccaggtggagcttgaggataataaaatgatataccatctctacccctgtgcttcttaattggaccaacaatcttataactttctggggctcttaggaaggtatttcaccagtatcacgaacgacacagctgattcggaggtcataccgttaaaacgatgtcccgaataaaaattccttcgaatcatggcgcaaatgaaagtttggggcagagaaggaacctactctggtaaacacaaaacaaca

SEQ ID NO: 969 - DNA, 567 bp, Triticum aestivum
agtaccccaacggtgtcggccgaaccgcgccgcgggttccggctactggaaggccaccggcacggacaagcccatccgctgcagcgccaccggctgagagcgtcggcgtcaagaaggccctcgtcttctacaagggccgcccgcccaagggcatcaagaccaactggatcatgcacgaataccgcctcgccgccgctcgacgggcacgccggcaacacctaccgccccatgaagttccgcaacgcctccatgaggctggatgactgggtgctgtgccggatctacaagaagaccagccaagtgtcgccgatggcggtgccgccgatgtccgaccacgaagcttgacgagccttctggcgctggcgcctgccacatgtcgagcgccggcatgatcactgcaaggcgacgaccggaggatacccattgcaggcggcggccagtgccacacaaaaggctggacaaaaacccctacaaaatcagaggaggcacaacgagaccccggagacagcagatcaacgaaaacagcggacacacaccgaggcacggaacaaaaacacgacgcccaca

SEQ ID NO: 970 - DNA, 755 bp, Triticum aestivum
  misc_feature (563)..(563): n = any nucleotide
tcggcctcgaggcctccacccgccccccacgcgcggccgaggctccagaggcgccccccgtctgcccggcgctcgccaagacgctgcagctcggcgtcttcttcgggctctggtacctcttcaacatctacttcaacatctacaacaagcaggtcctgaaggtttttccttttcccataaacatcacaacagttcagtttgctgttggaactacgatttccttgtttatgtgggccacaggtatccttaaaagaccaaagatttccggtgcacagcttcttgctatcctccctctggctattgtccataccatgggcaatcttttcactaacatgagccttgggaaggttgcagtgtcatttacacatacaatcaaggccatggagcctttcttctcagttctactttctgcaatgttccttggcgagctggctactccctgggttgtgttgtctcttcttcctattgttggtggtgtggcattggcctctatttctgaagcttcttttaactgggctggcattttgagtgcaatggcttccaatgtgacctttcagtccatngaatgtctcagcaagaagctaatgctgaagaaagaagccttctggcccacatcattctctcctcgatatacaggcatgtaatcttctcttaacccgttacttgttgacgacgtggcaggccccacttttgcgccttggtgtctggcacggtacagcttgttccatcttccgcccaaggtaataccagggcac

SEQ ID NO: 971 - DNA, 562 bp, Triticum aestivum
tccgcaaatcgcatgatgataccgtgcaatctttctcagtcgccttcgtgtttgccatccactctacctaccccatcatgagccgacagggcttggctttcgtcgtcgccccaagcatgaacttctcaactgcattggccaatcaatacttgggcctcatgaactcccagaacaacggcaacttgagcaaccacatcttcgccatcgagctagacaccgtcctaaacatcgagttcaaagacatcaacaccaaccatgtaggtattgacatcaacagcctccagtctatagagtccaaccctgcaggatactatgatgataggaatggtaccttccaagacatggttcttgctagtggtgatgcaattcaagtgtgggtggactacaatggtgaagccaagaaaatcagtgtgaccatggctccccttcaaatggcgaaacctacaaggccactcatctcgacagattatgatctctcaagtgtgttgcaagatccatccatacatcggcttctcatcttcaggtggagaggtcgactcacagacattatgtgcttggttgg

SEQ ID NO: 972 - DNA, 544 bp, Triticum aestivum
ggagtccaaggcggacgaggagacgatccgagggaggaagaggagcagcgtggacccgtacccggcatcgccggaggagatggcggcgcaggtctcatcctgcccgctctacttcaaggggcccaggccgattcgctgcaccgtccgcgccggcgagattctctacttgccgagcatgtggtttcaccatgtcagccagagccccgggcctaacgggctcaccattgccgtcaattactggtatgacatgcagtttgacatcaagtatgcctactttaacttcctgaggtcgctggagatcaaagattctccattggagaacaatgatgatgctttcgaaggtgagctcgaggagaagaacgaatgagctcatgggtttgtgatcatattggcgttccggacaatgccgcataggcagtattaggcagtatatggctcggtttttcgttgccattatctaacagttcttcaagtttctgaagtagtaatccagagcatggatctggattactggcggtgtatgttatgccaaattgcacatcag

SEQ ID NO: 973 - DNA, 522 bp, Triticum aestivum
gcattagcatgccctcaagggtggagaacatagtgagaaatcctgaaagtgaatccctgctcatcggcgagcccacgggtgaattccaggatgtgatcctcttcttcgggatcatcgacatcctgcaagactacgatatcagctagtagctcgagcatgcctacaaatccatgcagtacgatcccaactccatatccgcggtcgacccgaagcagtactgcaagcgattccgagacttcattttcagggctttcgcggaggatgtacagtagcgactccattgacaaacagaaaatttatactcaagagagcagaccttaacagttggctggtgattcttctttgcccaccatccagtattcttttgtaggtaacataatcgattctttcggttgtagacggcagcacgttgatatcacagtgatttcttcttcatgtaatgtgttcatagattttgtacatctaactgaatcttctctgtgcttatgtaattagatgtagggtgacagtaatcatgcgtgt

SEQ ID NO: 974 - DNA, 806 bp, Triticum aestivum
tcttccgctgttaccgacctctgccgcctgctgagatggatgacagttgcgcggtatgcgcggacacgctcgaatgggtggcctacgggccgtgcgggcacgcgaggtgtgttcaacctgcgtcgtccgccttcgcttcgtacttgaggactctctatgctgcatctgtaagacggattgtccctccgtcttcgtcacaaaggccatgggagattacacaaaagtgatctccgatttctctgttttgcccactgaggcaagtgagggaaatgtgggggagtactggtaccatgaggatacgaaagcatactttgatgacgctgatccattataagatgataagggcgatgtgccgactttcttgtagtgtatgtgacaaagctgaggatcagtttagtcaggcagcacaagcaaagcgccgaagcaggttcaagagcattgatcagctaaagggacatttgttccatcagcataggttatacatgtgtaatctttgcttggaggggagaaaggtattcatttgtgaacagaagctttatacaagggcacagttagctcagcatacaaaaacaggtgactctgaggtggatggctctgaggttgaacgcagtggttttgcaggacacccagtgtgtgaattttgtaaatatccattatatggagataatgagctttacacacatatgtccagagaacactattcgtgccacatatgtcaaagacagcatcctgggcagtatgattatttccggaactatgatgatttagagatgcattttcgtaaagatcatttcctctgtgaagat

SEQ ID NO: 975 - DNA, 328 bp, Triticum aestivum
gtactaatcttaagcttgtcaaggagtttggaaattaccctaacaacgcttttgcattatgggacttggttggcggacgctatagtgtttgcagtgctgtcggtgttctgcccttgtctcttcagtatggatttccgattgttcagaaatttctggagggtgcttccagcattgacaaccacttccacacatcttcatttgggaacaaatatacctgtactccttggtttgttgagtgtgtggaatgtttcatttctcggatatctggctagggcaatattgccatactctcaagcacttgagaaactagcacacatattcagcagat

SEQ ID NO: 976 - DNA, 326 bp, Triticum aestivum
  misc_feature (25)..(25): n = any nucleotide
ggtatatgaacaggaataaacttgnggcaagagattaagggaacagatcaaggggcatctgaggttgcagtatgagagcagctacactgaagcttctgtacttcaggatatccctatttcaattcgtgcaaagatttctcaaacactgtataagccatatgttgaaagcactccactgttcaaaggctgctcagcagaattcattcaacagattgtcatcagactccaagaagagttcttcgtaccaggagaggttattttggagcaaggcagtgcagttgatcagatatactttgtctgtcacggtgcgctggcaggtgttggca

SEQ ID NO: 977 - DNA, 278 bp, Triticum aestivum
  misc_feature (62)..(62): n = any nucleotide
  misc_feature (202)..(202): n = any nucleotide
caatcgcatccaaatatggttatccttggcgacgaggttgctgcatcaaaactcacattgtntgatatcacaaagcagatatgtgatgcagttcaggcgagggctggaaaagacaagaatcatggggttatacttattcctgagggccttgtggagagtattcatgaattatatgctcttctacaggaaattagtggcctcnacggtaaaggtgtttccgttgagaatatctcttctcaactttctccttgggcatctgcgctatttgagtttttgcc

SEQ ID NO: 978 - DNA, 263 bp, Triticum aestivum
catgttgtacctttgagccttcagatgtatggatggcgagtaattcaaaaggctctggaagttatggaacttgacgagaaaatagatctggtccgcgagcatgatggaaatattatgcgatgtgttcgtgaccaaaatgggaatcatgttatacagaagtgcatagagtgtgtcccacagaacatattggctttgtagtatctgcatttcggggacaagttgctagcctttcaatgcatccatatggttgccgtgttattcag

SEQ ID NO: 979 - DNA, 256 bp, Triticum aestivum
agacgtcctaatcactaatcaattccgggggaacaacgcgcaccgccaccaccggagcgtctgctcgtgaggtgaagggaaggggaggagaaggtttttggttgtagtgtgtgtgtgtcgccggcgatgggggcggacgcggagtgcgacaggataaaggggccgtggagccccgaggaggacgaggcgctgcggcggctggtggagcggcacggggcgcggaactggaccgcgatcgggagggggaccccgggcg

SEQ ID NO: 980 - DNA, 254 bp, Triticum aestivum
ctcgaggtggaggagggggctggcgggaaggaggagaaggcggcggtgtcctgctcgatctgcctcgacgcggtcgttgccgccagcgcggagaggtccacggcgaggctgcagtgcggccacgagttccacctcgattgcattggatcggcattcaacgccaaaggagttatgcaatgcccgaactgccgcaaaattgagaaagggaattggctgtatgcaaatggttcccgcccctcacatgatattaacat

SEQ ID NO: 981 - DNA, 234 bp, Triticum aestivum
gagcctgttacactgacgtgataaccaactagtacatcttgctgaaatcatattttggactaatttattgaaactatacacagttggacagattggttgcatgctaaaatgtttggatggattcgtctgtcttctccttgtgcagaggcggcgtgcgtgggcggcagggagtggtacttcttcagcctgcgcgaccgcaagtacgccaccggccagcgcaccaaccgcgccacg

SEQ ID NO: 982 - DNA, 969 bp, Triticum aestivum
acccttcagtgggatgctgcctgtcgacggtgtccgacctatctgcccgagctgttgtacccccgctcgccgcgcgccgcaatgttcaggctattgccacccagatccagcggtcgagctgccattgactgctgaaaatgttgagttggtgttggatgaagtgcgaccttaccttatggccgatggaggtaatgtcgtgttgcatgagattgatggaaatgtggtgcgattgaagctgcaaggagcatgtggatcatgcccagcttcagtaacaacaatgaagatgggtattgagcgacgtttgatggagaaaataccagagattgttgcagttgaacctattgctgatgaggagactggtcttgaattgaatgaagagaacatagaaaaggttcttgacgagatcaggccatacctttccggcacagggggtggtgagcttgagtttgtttcaatcgaggaacctatcgtgaaggtcaggctcacaggcccagctgctggcgtgatgactgtccgagtggccctcactcagaagctccgagaaaagatcccgaaaatcgcagctgtccagctattgtcgtaaaccttgaagcacatttagaagccaagcccctgttatgtgaatgtgccgctactgtaattctcaggaattcgtgataactgtatgtgtagcctcccacagctgcttaaactctcaatggcaacggccaatagaagttatctaaaaggctttcatttgctggattcacagcagttttggttcctgccttgtacagtgtttgcttctgcaaatgagagtatatactgctgatcttgcaatatttttgaaacacgtaaataatttggtatcaaggtttatccttgtggttttgtaggcctggtatcaaaccttgagtccttgtgtagctaatacatgcgcatatatgcgtacagctctagtagtatttacctaaaaggggactcgagtct

SEQ ID NO: 983 - DNA, 653 bp, Triticum aestivum
aagaggccggcgcgctttctctcatatgatccgaacccaagggaggcactgtggtcatcccgtgaggaggctcgcaccaagatcttgagtatctgggaccaggcagacattgtcaaggtcagtgagtctgaggtcgagtttttgactggcatcgactcagtagaggacgatgttgtcatgaagctgtggcgccctacctttaagctcctcctggtcactcttggaggtcaaggctgcaagtactatgccagggatttccgtggagttgtcccatcgtacaaaatacaacaagttgacacaacaggtgctggtgatgcatttgttggtgctctgctccggaaaattgtccaggatccatcatcactgcaaaatcaggaaaagcttgaggaggcgattaaatttgccaatgcatgtggagcaatcaccaccacaaagaaaggggcaatcccttcattgcccacagaaattgaggtcttgcagctgatggagaatgcatagatgcttacgatttcgctagcttctaattctgcaagttgtattgtacgctgatggagaatattcagttgtagtggatgatattttgtaccaggcataaatggaatcttgatccataaattcagctggacggctctgtatgatatctgttccatttc

SEQ ID NO: 984 - DNA, 1059 bp, Triticum aestivum
cttgatttggaatcagacccctggcctaagatatctgacagtgcaaaggatcttataagaaagatgctttgcaattgcccttcagagcgtttgaaagcccatgaagtgctacggcatccctggatctgccaaaatgggatggccactgatggagttttggatcctagtgttatctctcggctcaagcggttctctgcaatgaacaatctacagaaattggctctgagagtgatagctgagcgtctttcagaagaggagattgctggattaagagaattattcaagacagtggacataaaaaatagaggcgtaatcacttttggtgagcttaggaaaggtctgacaagatatggcaacgaattggtggataccgagatttgtgatataatggaagcggctgatacagacactgatgtaaccataaactatgaagaatttattgctgcaaccatgcctctaaacaagatagagcgggaagaacacttgaaggcagcttttacatattttgacaaagatggcagtggctatatcacagtcgacaagcttcaacgagcctgtgcagaatataacatggaaggcactctccttgaagagattattttagaggccgatcagaacaatgacggtcaaattgattatgccgaatttgtagccatgatgcaaggcaacgctaatggtggcaatattggacttggacgtccaacaatggaaaccagtctgaatgtgaccttgagagatgcagctcaagtacattaatgcacagattttgttctcttctcattgccattatgtccacaacccaaattgggttgtgggcatgtacttccgaagtacgggaagagaacaggtcgattctttcggcggcatttatcgaaaataagctggtctagctagcagtacagtcattgtgagagacagcgtcgtgggttccatatagtaagtagttgtgtcctggttcatatgactgcaagactggctgctatccagcaggtggaagtaagagggcgtgcggcaagttcgtttgttctttgtgtgatcagttgtgtactttgtgtctaa

SEQ ID NO: 985 - DNA, 768 bp, Triticum aestivum
gaaaccgcgcaaatcctaggccaccggcacccgagatggcggcggccttagcggcgggcgtcggcgtgctgctgccgttcccgttctactgggcgctgtggacgcgcccgcagcggtgggtggacctgtgcggccggggcgcggacccgtgccgccgcatggcgcaggtctcccacgtcctcaaggcgctccagctcctcgccctcgcctccgtcgcctccttctcctggccccctcctctatgcgccctccccctcctcgccttcggccagtacctcaactccaaggtgtaccagctgctgggcgagtcgggtacctactacggcgtccggttcgggaagaagatcccgtgggtgacagaattccccttcggctacatcaaggacccgcagtatgtggggagcatcctgagcctcgtggcgctgctgtgctgggttcccttccagtatgttgtggtgtggtgcctcggctatgttttcatgattttggtggaagacaaggaagatccagcgacccgtgccaagttgctctcctgactgttgtatttgctttgcggttgatagatgactcaagatctctcactgtccattagttgtgttgttcctggacgtgtcccagtcatgctggctagacattttgtttaataaggagatgtgagtgtttttttttttatcacggctctcagaccgtgagaaggtcttttgtgtctatggcgttcagaccctgagaagggcttctacacctatgacgttaagctcgattatcact

SEQ ID NO: 986 - DNA, 453 bp, Triticum aestivum
ggcgctcggcgatggggagaggcccaagcacttcatctgcggccgactggtggacgttaagagggcgcgtgctagacctcctcggaacttgggcgagcaacctgtgcatcaacatcagcatcagcatcagctggaacagggtccagttcagggtcaccaagacgctggggacagtaccgaggccagtagtgacagtatgagctatgcttcaaagaaggtattcattggtggtttgcgtgacaacatcacagaggaggagttcagagcttactttgaggcgtttggcactgtaacagatgttgttgtgatatacgacagcctgacaagcaggtcaaggggttttggttttgtcacctttgattctgaggaagctgtgagaaaggtgatgaggcaaagctttcatgacttgaaagggacaagggtggaagcaaagatcgctatccccaaggatgc

SEQ ID NO: 987 - DNA, 1282 bp, Triticum aestivum
ggcgctcgctcgctacttacgctgaccaaatacagattggactagctggtaatctgagggattatgtactaataactcatactggagaagctaagaagggatcagaaattcacactttcgatggattaccagttggctatacttcgtccccaatagaaataataaattatgtttctgctcatgacaatgagactctgtttgatgttatcagtgtaaagaccccaatgaacctttcagttgatgagagatgcaggataaatcatttggcctccagcatgatggcattatcccagggaataccctttttccatgctggtgacgagatactaagatttaagtccattgatcgagattcgtataactctggtgattggtttaacaagcttgattttacctatgaaacaaacaattggggtgttgggcttcctccaagtgaaaagaatgaagataattggcccctgatgaaaccaagattggaaaatccatctttcaaacctgcaaaaggacacattcttgctgccctagacagttttgttgacatcttgaagatcagatactcatctccgctttttcgtcttagtacagcaagtgacattaagcaaagggttcactttcacaacacagggccctcctcagtcccaggtgttattgtcatgggcattgaagatgcacgagatgagaggcccgagatggctcagttagatgcgaatttctcttatgttgtaaccgtcttcaatgtgtgtccgcacgaagtatccatggatattccagccctcgcttcaatgcgtcttgaattgcatcctgtgcaggtgaattcatcagatgctttggtggggaaatctgtgtacgaggcagcgacgggcaggttcaccgtgcccagaagaaccgtgtcagtctttgtcgaacctcggtgttgatgcctccttggtttcaacgcaagtatctgttctacaaattgtcgaagcgaccgaagatctttctgttttcgtgttgaaggaaataataactgaagaataagagaggagaggcgctgctgcctgcctgccggattacactgctgaaggaacaaacccaagaataagaagcttggcttatgtgtatgtatgtatagtgcccaagttgccaagtcatggctttgttttctgatccattttttattttatatatcaaaaggaaaacatgtatatcgtgttataagtattgtataacatgcatctactattaaataaggaagcataatgatttgtagcggtactgcctttttaactctgtatagagctat

SEQ ID NO: 988 - DNA, 963 bp, Triticum aestivum
gttcatcgcaatgtatgctactctagctagtcgtgatgtggattgttgcttaatcccagagtctccattctaccttgaagggaaaggaggcctccttgagttcgtcgagaaacggctcaaggatagtggtcatatggtcattgtggtggccgagggtgctggccaagatctcatcgcccaaagcatgaactttgtggacactcaggatgcttctggaaataagctgcttctggatgttggcctttggctatcccagaagatcaaggatcatttcaagaagaagaccaacttccccataactctcaagtacattgacccgacatacatgatccgcgcggtccggtcaaacgcctctgacaacgtctactgcaccctgcttgcgcacagcgccctccatggcgccatggcaggatacagtggcttcaccgtcgcgcccgtgaacggcagacatgcttacatcccattctatagaatcactgagaagcagaacaaggtcgtgatcactgacaggatgtgggcgagggtgctgtgctcgacgaaccagccctgcttcctgagccacgaggatgtcgagaacatgaagcacgatgacgacgagcgccaccacctgcacaacacgcagctcctcgatggctcacgggcgaagtgctcacccaactgtaacgggtcagctggagcagagtgagaggcacaaagctgttgggatggatatattgagcatgtgtaattatagctattcttttttaaccttctcttgtgagttttttagcttgccttgtagtagagacttctccggagaattactgtataactatatataataagggttccacgatggcaatctttgctggtagaagctcgattttgtagattagaaaatgctaagttttgggttcgagctcttcgcaacagaagctcttttgcaacacttcatctgaatcctggtttattattcacttgtaa

SEQ ID NO: 989 - DNA, 744 bp, Triticum aestivum
attcaccgcacctacctcggcgggggaatcaatttcactgatggatccgttgagtattgccgcgacgcaaatgcccggggaggctgctggatggttccgcggaacagcggacgccgtcagaaaatttatctgggtgcttgaggactattataagaataaatccatagagcacattttgatcttgtcgggcgatcagctttatcgcatggattacatggagcttgtgcagaaacatgtggatgacaatgctgacattactttatcatgtgcccctgttggagagagccgggcatctgagtacgggctagtgaagttcgacagttcaggccgtgtggtccagttttctgagaagccaaagggtgacgatctggaagcgatgaaagtggacaccagttttctcaatttcgccatcgacgatcctgctaaatatccatacattgcttctatgggagtctatgtcttcaaaagagatgttctgctcaaccttctaaagtcaagatatgcagaactacatgactttgggtctgagatcctcccgagagctctgcatgaccacaatgtacaggcttatgtcttcactgactactgggaggacattggaacaatcagatccttcttcgatgcaaacatggccctctgcgagcagccccaaagtcgagtttatgatccaaaatcccttttcactcgcccgatcttgcaccaacaagtcgacagtgcagatcaacaaggatattcgccggtggc

SEQ ID NO: 990 - DNA, 528 bp, Triticum aestivum
ccgggatgagtactccgtggggagctcctacaacctgatacgttcatcacggttgcacccgcaggccgccgggttcaaggacgtggccagcgcgtgctgcggcggcgggaggctcggcgcgcagacatggtgcggggcgcccaacgccacctactgcgccgaccgcaacgacaatgtctactgggacgaggtgcacggcacccaggccacctccagcaagggcgccaaggccatcttcgccgcccccgtgaagctcggcttcgccgcgcccatcaacttcaagcagctggtttcttcttgatcgccggtcgaggcattgcaccggacggacacgatctgttgtcagctcttaatttagttgcgagtgttcaccctttgattaagggaggggaaaagaatgggtagcacactttttgattcttttgtagatcggtggagatgcaatagaatcatagagagggtgcagtgatgcatgcgattttatgttcaaacaagcggccaaatggcccgaaaatacactcttgaata

SEQ ID NO: 991 - DNA, 868 bp, Triticum aestivum
  misc_feature (222)..(222): n = any nucleotide
aaccttcccgggagtagacagcatgattttgacaatcccagggttccctcatacacattttccaccctgctgatatttttcttccaagaaatcttcatggttctgaaccccttgggcatggtcaatttgcatggaattgaaccttctggccaccggttcccaaggacacatacatccagatgatccaaactttgatgactattctcgacatggttttccacnaagaatctggccgcttcagttcgggtggtttcttcagtagtggagatgttggttggtgccggatatgcatgtttaactgtgggagtgcagaggaccttggtctacatgtgcatacaagagaacatcagcagcatgcaatggacattgttctgaaaatgaagcatgatgttgcgaagcgacagaaaatgaatcctggaggccccaagtcattaaacaaaaagtagccatgaagagcaacttccatggaaataggcgttagacctcctgttacatagttcagcattcgatgagatttcaagaaagtgacaagtttaagaaattccatgcgagggcttcatgttcatacaatcatacttgcatgctttcctgaaggcgtttggaagtatcaccgtcccgtccctggccctgttttatcatctgatgtactttacgtacaaatttgtttatgtagcactattatgaccactagttctctttccttctcggtatctttgttgtattgctaaaaatttggctatgagctccttttgagttatttgtaagactttgtagcgattattgcgttgtggagtgtaagagcatctccactagagttagctgaatttggttaccaaaaaagttctagatggagagaattaatggaaaa

SEQ ID NO: 992 - DNA, 645 bp, Triticum aestivum
tacagatctatgaacatggcgaggaaacaaatggtctgatatcgcctctaatgtctgagagagaagacagtgacattctgaatggtttcgaggggcatgatctttccatgtacccaataaaccggagcttccacatgccaaagcagaaattcgactttgcacaatactatgcatttgacatcacaatattcgcgctcacgatgatctactcactgttcgctccgcttgtggttcctgtcggtgcagtatactttggctaccgttaccttgtggacaagtacaacttcctgttcgtgtacagagtcagaggatttcctgcaggcaatgatgggaagctgatggatagggtgctgtgcatcatgcaattctgtgttatcttctttcttgctgctatgttgctcttcttcgcagtccagggtgattccatgaagctgcaggctatatgtactcttgggctgttagtgttctataagttgctgccgtctggaagtgatcgcttccagccgtccttgttagaagggatgcagtcagttaatagctttgtagacggtccaacggattatgaagttttttcacaacctgacctggattggaatctgtatcaatcctgaagaaaactcaaggtcaatacacacttgtttcatt

SEQ ID NO: 993 - DNA, 741 bp, Triticum aestivum
tccccatagttcacccaggcgcggcgccggcgggcaacgtcgagatggaccaccaggcacaagcagcagccgtgacccgccgccaccagcggctcacggccgtgaaccagcagcaggtcggcgggcagggaccgaacacctgggtcggcaacgacgccaacacgctgctggtggtggccacgctgatcaccacgctcacctaccagctcggcaccaacatccccggcgggtactggcaggagacaaaatcgctggacggcagggagctttaccgcgccggcgaccccatcatgcgcgacctgcaccgcccaaggtactggttgttcatggcggcgagctgggttgggttcgcgagctcgatggtgatgacgctgagcctgctggtgcggatgtcggcggactcgcggcacgtgcggtggtcgttcgtggtggcctactccagcctcgtgctcaccttcgtctgggcgggcgtccgcgccttcctctggctcgtcatcagcgtccacccggagcaccgcacgcgcatcgtccaggcactctgctgcagccaccgcaactaggagttgactggcgggtgactctatcgtccacacccggatacgtagtttgattggctaagggagattagcggtacttcttttaaataatcggagggagtatgctcacgtgaaactaagtaaactagttatcgatgattaccgtttttcttccagctgtgtgacatagtgctgatgttaatga

SEQ ID NO: 994 - DNA, 618 bp, Triticum aestivum
ccggccgcgttccatgggtgtccttcgaggtgatctgccgtccctggcgtggggtgctcattttttcggctcggtgatcggtgccggcgctcaaggaagactgtccccggcgagcggcgagccgtcgcagctgcggcggatgggcgccgggcggctgctcatggcgttcgcgatggccgtggcggcgctggtggagatgaggaggctggaggccgtccgggagcggggagtccatcagcatcgggtggcagatgccgcagtactttgtgctggccggcggggaggtgttctgctacatcgcgcagctggagttcttctacagcgaggcgccggagtcgatgaagagcatgtgcacgtccttcgcgctgctcaccgtggcgctgggcagctacacgagctcgctgatctacgccgtcgtgaaacgcgctcacggccaccggcggccggcccgggtggatatcggacgacctcaacgaggggcacctcgactacttcttctggaccatggcggcgctgtgcacgctcaacttcgtcgtgtacagcgccttcgccaggaactaccaggtgaagacggtcgtgtcgtgatcgtgatcgtgatcgtactcgtcggcgtacata

SEQ ID NO: 995 - DNA, 779 bp, Triticum aestivum
gagcgcacttactcgagctgatatagtggttattcatcatgcggatctggcttgtgaagcgcagctggaaacaattgcacgtacagtccaggatagtggcacaacatgttcagtgttctttagtaaattggccccatcacatgttttcgaggttcatcaaccattacagagactatctcttaatgtgttggatggcatgattgtgctatgtgtttctgcgattggctgcccagatgctttcatacatacagtcagagagattggtccacttaatgttgataggttggatttcagtgatcatcatttcttcaatgattatgacctagaattaatccaagaaagagtgaggcagcttgtggatcaacataacaaagagactgtagtcttagttactgagaaggattacgaccgtgatccagatgtccttagaatgttgggcgtgaaggtttgggttctgtcttcttctttgcaaattatgcccctcaaggaacaaggagaagatgaattgctgaggaaattaaaagacattatcacagcaactaggcatgtggtccagccatgagttgctgatgatctgattatattcggctgggcacatcttgaagcaaaaacagttttccattggtcctgttaattccgtataatgttatatcagatttatcttgttaattcaatcctgtttcagcgttttggaacatgcagtattttagtttttttttcaactgggtcagtggtctgagcctccagttaacttgaactggatctaacagataatgagg

SEQ ID NO: 996 - DNA, 600 bp, Triticum aestivum
  misc_feature (53)..(153): n = any nucleotide
  misc_feature (395)..(461): n = any nucleotide
ccggacaacgacgtcaaagaaccactggaacaccaaggctcaagaagcgcctnnnnnnnnnnnnnnnnnnnnnnnnnnnnnnnnnnnnnnnnnnnnnnnnnnnnnnnnnnnnnnnnnnnnnnnnnnnnnnnnnnnnnnnnnnnnnnnnnnnnntccccgtgccgaccgtgaaggccgagacgtacacctacgacgacttcctggcgccgaccgccgggctgcaggacccgttcgccgccgagggctcgtcttcggcctccgccgcgctgcaggacccgttcgccgcggagggctcgtcctcggcctccgccgcgctcccggacacgctcgccggcgagggctcgacgtcggcctccgccgcgtcgtcggggtccaactggtcggcggtcgacaannnnnnnnnnnnnnnnnnnnnnnnnnnnnnnnnnnnnnnnnnnnnnnnnnnnnnnnnnnnnnnnnnnggcggcttctactaccctctcgacccgaccctgtcactagtgtagatcaaccgatcgacgcgccacgcgcgtgcgcgcgtcctcgtgaccgatcgatcaaacgtgtttgttatcaaaagcacccgatcttcatgagtaa

SEQ ID NO: 997 - DNA, 587 bp, Triticum aestivum
taaaagaaaaataaacctgaagaatatgaatcacgtcgcaaagacaagctgaggtaccgttatcctagaggagaatcctacctcgatgtcattcagagattggaacctgtaataattgagcttgaaaggcagcgtgccccagtggtagtcatagctcaccaggctgtgttgagatcactatatgcatatttcgcggacaaaccactggaggaagttcctaagattgaaatacctcttcatacaatcattgagataaaaatgggcgtcactggtgttgaagagaaaagatacaaactcatggacgcagtgaacccaactgcagaggtctgaggcatggcgcatggagtctgtcctctcaattcagacagcacgaataaatttccggatgatagttttatttaccgaagtatgtagatgtagatgatacccaaacgtatcactatatttcattgtccagaagtaaagctatagtgcaaaagtgaaccattctttatgaagtctggcacatagatgatcaaagttttgaattttggctggccatgtaaaggttcgcttggggcaatccagatggattcattcatgttcaa

SEQ ID NO: 998 - DNA, 576 bp, Triticum aestivum
gggcaccgcgttcggcggcgactctacggtgttgggcgagccgggcggttccgtggaccctcaacaccgactacagcaactgggtgtccaacatagaagttccacccggggatgagatcatcttcaagtactcccccgcggcgcacgatgtggtcgaggtcagcaaggctggctacgactcctgcagcaccgccagcgccatcaacaccttcaagtccggcaacgacgtcgtccccctcaacgccaccggcacccgctacttcatctgcggcatcactggccactgcagccccaccgccgccgccagcatgaaggtcgtgatcgacgtcgtcccgagttcctcctcaccgtcgtcacccatgccggctgccggtccggacgcgagcaacccgccgccaccctcctctaccgcatcctctgtcggggccacagcaggatttggccttgtcgtcctactggtcgccagtctcatggtttaaaatgcatatttcagccagctgcatgccgcacgcacatatgagcttacatattgtttgactggttattacctggggaatacaacatgtattattgctt

SEQ ID NO: 999 - DNA, 1153 bp, Triticum aestivum
  misc_feature (777)..(777): n = any nucleotide
  misc_feature (1080)..(1080): n = any nucleotide
aacgggcagaagagttctcctccttgcggtttcgaaaaagggctcatcttcgtccctcccaacaccgaacccgcccagccaccatcccgatactgcttccgccatggttcagatcaaggaattccgaatcatcatgcctatgtcgatggaggagtatgagatagggctcagctacaccatcatgaagatggagcagcagaatacaaatggcaaggagggcgtggaggtgctgcagcaggtcccttttgaggatgagaaactgggcgaaggccaattcacctcgaaagtttatcatttgcagagcaaaattccatcttggatgaagggctttgcatccgcgagttctctcgctgtgcatgaggactcgtggtccgcgtatccaaagagcagaacagtgatcaagtgcccgctttttagcaagtgttcactgacgattgacactgtgataagacctgacaacggctgctctgaaaatgcgcacaatctaaacagccagcagctagctgaaagagaggtggcgatcgtcgacatcgcgtcagtatcgcgggactactggagcaaggtgatcactgctccaaaagtcgacctcacaactttcaagtccccaacggacggagcgaggcctcttctgaatgggtggatggattcatgccgtcccatgatgccatatacaagctggtggtcatggatgctcccatctggggcttgggcgaacggctcgaagactgcctcatcgcgggggagagggcgctgtttctggcgtgccaccggctgtgnttcgcgtggatagacgagtggtacggcatgaccatggagcagatccgggagatggagaggcacacggacctactcctcaaaaagacactgaaaaaggctgcaaaacctgggagcaagcacgagggcaagaggaagtcgctcaaagacgaaatcgccgttgtggggagctgcacctagtgctggttccgtgagacgatccgtttatttcagtgtcccatttagctgaattaccaaaccaggaggacatctcaggttatgggtgcatcgaaatatggcttaattaacactgtacatatatgtaancagccactgaagatgctgctgctgtagccaaggcatcatgggctgtaagtgcgtctggtttaatgtaaagtat

SEQ ID NO: 1000 - DNA, 1083 bp, Triticum aestivum
agtacacttcagagctgctgacttatacagacagtgctcctcaaagaggtttctaaaagttccacaagaagatggcaataatagtgggccgccctccccagtcgcagcttctcagacttcaagccaagcagctgcatttcctgatttcaaactggcagaggtgccgaaagtagttgtaaatgagaagaatgagcctgagtctgaaactattcgttcacctaaagctcctacccattcattcaagaagccatcggtggaaagaagcctggaagtaagactggtggacttggtgcgcgcaagcttacgacaagccaagtgaaagcctctatgagcagaaacctgaagagccagctcctgccctgccatcagtggctgaaagcactacagctaggagcaaatctcatacttcccgatttgaatatgtggaaaatgtaccttctgctgggagcagctctgcggaaaaccaggcgtttgggcatgttgcgcccccaaagtcttcaaacttttttggtgaatacgggatggacagtggatatcacaagaaatctacttctggtgcatccaaatgcaggtcgaggaaagtagtgaagcaagacagaagttctcaaatgcaaagtctatttcatcttctcagtttttcggtgatcaagccaatttagaaaaagagggccaaatctccctccaaaaattctctgggtcctctgccatttcaagtgctgatctgtttggccaacaagcgaacaattctaatgcggatctgagtgcttcggatttgatcaacagaatctccttccaggccactcaggacttgacctctctcaagagcatggctgggcagactgggaagaagctgacatctatggcgtccaacatcatatctgatcttgatcggatcctctgagctgaatttacatatcacaggtcttcgatggtccgcctctcctgattgttactgcatgacaacagatttgtggtggtggctctgtatatgagtccataggaatcttaaaacttaaactcggtagagaaagaatgaggattttatcacaaatgctttctggctaaagtcgtaatagcatttgg

SEQ ID NO: 1001 - DNA, 778 bp, Triticum aestivum
ccagagtgtgcaagtttctgtgcatcgcgtaaatgagatagagtctccacctcatgtctgtgagatagaaagcgagaaaggcactcaagagggttaccaatcttccgggagccatgccttgtcaaaaacacgatccgagcaaagcatggaccagtgggtgtttgcaaagtcaaagtcggagcagagcatggatcagtggtccgaaataccttccgacgtagagtcctttagagaaggtcataaaaggtacttcagcagcgaggccgaggagatgagcgacgtcgacaactccaatgtgctcgtcatggacaaatacatggactcgctcctgccggaccggagaagcctcccgtacgccagctcctccgtgagaagcgattcggtaagaaggaagcccgccgcctcctcccccgactacagccgccgccctccgcagcccaccccgcccgcgtcgctgtcgaagaaggaatcatgggatctcattcaggattcggagtttgagatactggacagctagcaataataagaggtctttgattgatctccatggcttcgttaattttcttcattgccctactacctttcacctggtttgtaaatggcggccttacaggtggtgccagtgatggttggaaaagatcttgtcagtcagtcggtaataatatcgtgtgcatatatatgtcctctcatcccacttgctgtaacataaggaatttgtgatggatctggcgagtgtgaggcctggatattggcctccctgctgcagaaaatttatgtt

SEQ ID NO: 1002 - DNA, 820 bp, Triticum aestivum
tctccggtgccaggcccagcggcacaatgtgatctcggcatctttgatacctgcaggagcgtgccaaaggcagcaccatgtatggattcaagggagcccagctggtgtcatgaagggcaagtacgttgagctgactactgatttcgtgtacccctacagaaaccagggcggatttgatatgatctgcagtggaagggacaagattgaaacaccagagcagttccagcaagctgaagacacagtcaacagacttgatttggatggacttgttgtcatcggtggtgatgattcaaacactaacgcatgcctccttggtgaatacttcaggggaaggaacttgaagactcgcgttattggttgcccaaagactattgatggagatctgaaatgcaaggaggtcccaacaagctttggatttgacactgcttgcaagatatactccgaaatgattggcaatgtcatgactgatgcacggtcaacaggcaaatactaccactttgtgaggcttatgggtcgtgctgcttctcacattacactagagtgtgctctacagacacaccctaatgttgcactcatcggtgaagaggttgctgagaagaaggaaacactcaagaatgtcacagactacattaccgatgttgtttgcaaacgtgcagaacttggttacaactatggagttgtcctaatacccgaaggcttgattgatttcatcccagagattcaaaaactcattgcagaattaaatgaaattttggcacatgatgttgttgacgaggcaggggcttggaaaagcaagcttgaaccagcatctagggagttg

SEQ ID NO: 1003 - DNA, 879 bp, Triticum aestivum
gacgccgtcgaggtggtggtgagcccgccgttcgtgttcctgcagcaggcaaaggggctgctgcggcccgactctcgccgtcgccgcgcagaactgctgggtgcgcaagggcggcgccttcaccggcgagatcagtgctgagatgctggtgaacctgcaggtgccttgggtcattttggggcactctgagaggagagcactgttgaatgaatcaaatgatttcgttgctgataaagtggcttacgcactcgcccaaggactcaaggtaattgcttgcattggtgaaactcttgaacagagagaagcagggacgacaatggaagttgtttctgctcagactaaagctattgcagagaaaacatcagactggacaaacgttgtgctggcatatgaaccagtgtgggccattggaaccggcaaggttgcttcccctgctcaagcacaggaggttcatgatggtctgaggaagtggctccacgctaatgttggtcctgcagttgctgaatctaccaggattatctatggaggctctgtaaatggggcaaactgcaaagagcttgcagctcaacctgatcttgacgggttccttgttggcggcgcttcactcaagcccgagtttgtggacatcatcaagtctgccaccgtgaagtcttcttctgcttagttgtttttgagatgcatgcagttgcttgtaggagtggattctgcttatctttataagactgtttgaccatcttgttctaattcgagtgcactgttatgtcgcattgaccatcttatctttagggtgatgcatgcttatgtttgcttgtttttgtctggaacgataatcggattacttatatgtaccaactatgcacaaattcgaccaaattcgca

SEQ ID NO: 1004 - DNA, 1084 bp, Triticum aestivum
  misc_feature (622)..(622): n = any nucleotide
ctcattgtttaatatgatgacatttaaggtgatgacaacattcatgccacctccaccagcatcgacctttttagcatttcaccctcaagataataacatcatagcaattggaatggaagattcaaccatccacatatacaatgtcagggtagatgaggtcaaaattagactcaaaggacatcaaaagaggataaccggattggccttttccaacagcctgcatatacttgtttcttctggcgctgatgcacagttatgtgtgtgggccaccgattcttgggaaaagaagaaatcggtcgctatacaaatgccagctgggaagactccatcaggagacacaagggttcagtttaattctgaccaaaatcgcttgttagtagtccatgagactcagatagctatttatgatgcgtccaagatggagagaatctaccagtggatacctcagggcactttgtcagctgccatatcacacgcatcggtactcgtgcaatagccaactagttttttggctgcttttactgatggtaaatgttgccatctttgatgcggataacttgagattacgatgccgaattgcatcatctgtttacatgtctacgacagccataaacagcaatcnacccgtttacccttttgttgtcgctgcacacccccaagaaccaaatcaattcgcagtcgggctttcagatggatccgttaaagtgatggagccgttggagtccgacgggaagtgggggacgcctgctccagtggaaaatggggtggccaacggaagggcgccagcatcatccgctacaagcaatctagccacagatcaaaaccaaagatagatgcatgttgagttaattgtaaaatcttgtcatccgcatgttggtgtcagcaaggttattgttgcgtttcttgggaatgtaagattagctgtgtgtttatgttgtagttgtgagatgattacccttgctcctatgagtgatgatcttgtgatagggataaagttcataagaaggttcgccttaggttttgggcagtttaaacggaatagccggaccctgtaggtatcttgatgcataatgatgtaaatcac

SEQ ID NO: 1005 - DNA, 673 bp, Triticum aestivum
aggttcttgaagaacttccaagacagagaaagggaatttgggatatcagacattcaactcggtctcacgacacttgaagaagtcttcctgaacattgcaagcaagccgagctggagagctctaccgccgaggggacactagtgactcttaacctgtcatccggagcatcaattcagatacccaagggggcgcgtttcgtgggcattcctggaaccgagacggaggagcatccgagaggagtcatggtggaggtgttctgggaccaggatgacagcggaacgctctgcgtctctggccactctgatgaaacccctgtgccggcaaatgtggagctgacaaggcctccttcactttcgcgcagggggtcggtcggccgcggaggccctgtagggtacgtcattgacgaaaaccaggtccccacagcaagatgatgagcttgaacgcaggaggtcgatcgattttcgtgtgaactatctcaggggtggttgtaagtatagaaaggctggtaatgtacattatgtttgtactagagcattgtggtatcctgtttgccgtggttaattaagggcttggtacgtaattaatagatggaaggtgatgtcgtttttgtcttgtggcaagtgtgatgacacatattgtagggttggttgaaaagtatattatgttacagcga

SEQ ID NO: 1006 - DNA, 628 bp, Triticum aestivum
gagcattcgtctcactgttgtggagaccatgacatgtggactccctactttggccacagtccatggtggacctgccgagattatagagcacgggatctcagggttccacatagatccttatcatccggatcaagctgcaaaatctgatagctgacttcttcgaacaatgtaaacaagaccccaaccattgggttgaagtttctaatagaggcctacaacgtatatatgagaaatatacatggaagatctactctgagaggttgatgacattggctggggtttatggcttctggaagtatgtctcgaagcttgagaggcgggagaccaggcgctatcttgagatgttctacatattgaagttccgtgaactggcgaagactgtacctcttgcagtagatgaggcacactgactgtaggtcctcgacgtgatgagatctgagggaaatcttcctgctgtcagtgggaatggtataggcaataatgtgcagcagatggccgcttggccgataataaaatggaatgtaacttgtgtgttcagcaagtgacgaacttgggagttgggactctgtaaaactagatttgtcaaacatcttgtctatgtacattaaaatagtttgatactcagtgc

SEQ ID NO: 1007 - DNA, 592 bp, Triticum aestivum
acaactcgtttgaaggacttcactggggggtttggacaataatggaatggatttcgtgagacccttccctgggctttctggcctacagaagtggaaaattgaatttttccaagtggtttcactcgcaatgaacaaagtggacaagggaaaggactttcaaagaaggcccgctgagggttcaccctctgctttgcctgtgcctgatggaagagccagcagtggacctcagaaggggcagttgtccaatgggaggacaacgggtccagcaaggcgctcgaccaagggaaattggaccctcgaagaggacgatatacttcggaaggctgttgaaatccacaatgggaaaaattggaaaaagatagctgagtgttttcctgataggaccgacgttcaatgcttgcataggtggcagaaggttttgaatcctgagctagtcaaagggccatggtctaaagaagaagatgacatcattattcagatggtaaagaaatatggacccacgaaatggtcaaccatcgcccaagctttgtcagaacgcattgggaagcaatgtcgcgaaaggtggcacaatcaccttaatcctggtataaac

SEQ ID NO: 1008 - DNA, 588 bp, Triticum aestivum
cattcgaatgagccattccaaggagtgatgtcaaccgtgagtactttcagaagagcatgatcgtaaggctgcagctggcatagattatgactcttcatatggaaaggcccgtccaaatgataccattctgaagcttcagaggacttcaccatattacaagaggaaccgagctcatgtttgcagtttctatgtgcggggtgaatgtacaagaggcgctgagtgcccatatcgccacgagatgcctgagacaggggagttatcccagcagaacatcaaagatcgctactatggagttaatgacccagtggctctcaagcttttgggtaaggcaggtgagatgccatctctgcaaccaccagatgatgagactataaggaccctctacattggtggacttgataaccgagtcagtgagcaggatttgagggatcagttttatgcacatggtgagattgaatccatcaggatggtaatccagcgtgcttgtgcatttgtgacatacacaactagagaaggcgctgagcgtgctgcagaggagcttgctaacaagctagtcatcaagggtgtgcgcctgaagctcatgtgggg

SEQ ID NO: 1009 - DNA, 550 bp, Triticum aestivum
cctttcgagacctgatgttgaacagccgcgagccgatgcaggtgtgggtggactacgatggccaggccaggcaactcaacgtgacactggctcctgcgcacgagcccaaacccaggtatcctctcctctctgaagccattgacctctcctctgtcctcacggagacaatgtatgttggcttctcgtcgtcatccggcgtggtgtcaacgcaccactatgtgcttggatggagcttcagcttggacgggcctgccccgcctcttgatttctctaagcttccagcactgccacgtgtgggttcgaagcatcggtccatggtcttggctctcgtgctaccactagcaaccgtattgatcatcgccgcggtgctagctgccgcctccttctttgtgtggcgtcggcgtcgatttgctgaggtgcgcgaagattgggaggatgagttcggcccacaccggttcgcatataaagatctatttcgtgccactgatggattcaagaatggaaatttactcggctactacggcgatgacggtgccacctttcgagacct

SEQ ID NO: 1010 - DNA, 550 bp, Triticum aestivum
cgagatcgcactcgacgggcactcgctcttccggcgtctccgccccccgagcggagcgaccacgagaggttcacgctgcgctgccgcaccacgtgagggagcaggtgctgagtcgcccggcctgcgccacgccaccagcctgatcgacttcgccggagcgagccccgaggggagcgtgcgcggaggccgcccgcgggcggcagcagacacggcgggcggcggtggcaggcgttcctggcgaggacgatgtcgtgggcccgagggggaggcgacgggtcggtgcggaaggggtgggacgggtccactcggaggggaagggacgacgccgagtcgagcagaaagggggccgcttcgccggcggcggcgcggccatgatgaactccacaccgccaccggaactgcagtgcagagcttgactgtaaaaaatgcgtgtaatttgatttgcttaattttttagttgagatatggataaatttaatttttcgtgtttttagctaggaatatgaatgtttgcgtgtgctctcgtgaggctgaagttttttctcgtttc

SEQ ID NO: 1011 - DNA, 525 bp, Triticum aestivum
ggttgctgagaagagctacttgtcagctcctcaccatgcagagttagttgaacgcaagtggggtgggagcacacacttcactgttgaagaggcgaaaaagaggatccaggatattctgagggagtacattgagagtggagacacagatgaagcctttaggtgcataagggagctgggccttccattcttccaccatgaggttgtgaaacgtgctctcatccttggtatcgagaatctgtcgtcacagccattaatcctgaagttgttgaaggaatcaacgacgggttgtttgatcagttctaatcaagtgtcgaagggtttttctcgggttgcggagactgttgatgacctgagccttgatgttccttcagccaaacactttttgacacgctgctttccgcagccatatctgaagggtggcttgatgcttcattctgtaaatctgctgcccctggtgaagatatgtggaatgcaagcagtgaaaaggtgaagcattttaaagaagagtctggtcacataattcag

SEQ ID NO: 1012 - DNA, 763 bp, Triticum aestivum
cttaatggcggcagtaatgagtactgtgcggtggaccaccggtaaagtatttcatctcaatgtgggggtcctcacgctggtactgcttcagtgccactttgtggttctggttttctttgcgttcttgttgatgcgctgattcaactggagatatattcaaactatgtgcaggcacatcttgcccctagcggttacctaaagattcccactgatatgacagcttatttgcagggttgcaaatttcttccgaagcttaataatgagataccaagtgaaagaaacattacatataaagaaagatttagcagcttggagaacttggtattgatcatgtttgaggacgacgcagtcttgatacctcgggaaacagcatggtttggttattatcctgatggtgcctttaatccagtgctgtctcctcaagagacaaagctatatactgaagactggatcggcttgaggactttggatgaggctgggcgtgttaagtttgtgtcggtgcccggaggtcacctccgcatatcaaggagcgacatgaagaagtacatagtgccttatttgacaccgtcatgtggatcatccaagcagagtattcgtcgaatcttgtcatactgaggataggtaaaccacgctggcggctgtaatcgcacttgttctgggtctttgtaagcccaacccatgtctctatgcattagtaccttataaatacattggcgaaacagactggaaccataacgttgttgtgctcagagtaaatagactg

SEQ ID NO: 1013 - DNA, 919 bp, Triticum aestivum
cgacacaagccttcactctctccctgcaaggcggcggcgctgccatctctccttatctccccgccacagcgtggccgccgccatatctcccctcatggctactcccagctgcctcccctccatggcgtgtcaatcaacccacacccttctctcaccgccgcctcccatcccccatggcgtcgctcatcccgtccactccccgccacggcgttgccaacacatctggcacggcgagcagcgagatccgaccgggaggcgcagaaggcctcatcgttatccgttcgcagaagtccacatagctggcccgtccggatttgggcgagatgacctcaggcacgaggtgtggctcgacgagttggagggatggccccctggtcgtcaggcccggtcttctacttcagccgagacgcgccgtccatctccatagcggggacatcccaggcagcggcggagtagcctccagggaaagctggaccgagcacgagcacgacaagtaactcgaggcgctgcagcgtgggagtcttgtacacgaagaagtactacaaattggcccaagcaccagtattggatgcgtcatatatcggactgatcaaacccaacagcctcgttcggttcagggggatggttcaggacatgctcggggcgggttctatgccgactctttaaaggatgtgctacctggaggacaaaaaagttcacagacttctcaccattctcgatgatgtacccatgtgattcacatctctgggtgcgccatctctgccattgcgtgcctgcagaattcttggatactggagtctccccctggacctgtctttcgccagatggcaaactggttgacacctgaaaaaagagataaaaggaagagggatggggatggtgatgtcaatgtaagctcttggcatgtttgttactaata

SEQ ID NO: 1014 - DNA, 751 bp, Triticum aestivum
acatctggcagctggttgaacggttacatggctactgtgacaaatcttaagagtccctgaacaagtggcgatgtggtgctgctcctatttcgtccatgatgaccgtgaagcgatggtcacgtgggccctgcaaccacacaaatcgggaagccagctgtgcatatggctagcgttgacttgagaggaaaagcatacgagatgttgaggcagaattcatccagctgcttgctggaagacatctacagaaaccctgggccactccaattcgaagggccaggtgctgatgccaagcctatttcactgtgcgtcgaggatcaagactacatgggcaggatcaagaaattgcaggaatacttggagaaggtgaagagcatagtgaagcctgggtgctcgcaggatgttctcaaggcggcactgagtgccatgtcttcggtgacggagacactggctatcatgacttcctcttccactggccagcccccactctgaaggccaagcacttgagttggttacgaatctactacgcatttcctgattctcttttgctccatctgacggttgggtttcgagacagtgatcttgtcatcacatggtttattcttttcctagattttcgggaagttttatgatcatttttggctctgatagcgtatgcgggtgtactattggcgagattcagcttgaataattttgatcaaactgtcggctgtgatctattaataatctaaattttgagagggtccatctctag

SEQ ID NO: 1015 - DNA, 795 bp, Triticum aestivum
gatattgtcttcatcattgaagagaagccccatgatgttttcaccagggaaggaaatgatctagtcatgacacagaagatctcgttggtggaagcactgactggctataccatgcaactcacaacgctcgacgggcggaacctgtccatacaagttaactcggtgatccaccctagctatgaagaggtgatccctggagaggggatgccaatacccaaggagcccggtaagaacggaaatctgcgtgttaagttcagcatcaagttcccttccaggctgacgtctgaccagaaagctgggatcaaaaggcttttgggttcttagcctttgtgtgccatttctatagactgatgaaagcgactgtgaatatctccagcgtgtggctaggtagatttctatctgtccggatgggacaatgagcggaattggtcttggttattccgtttacatatacctgtagaaatgatgttgtcattctatgtgttgttttccccataacttggtagaggctttttcacatatgtgaccaggctggttgttgtcaatgttttaatctgttcttcctcgggatcgtaggaaggtttgagttcagaaaggttatacagattttgttccctgtcgtgttgggataattcggctttgttatatatttgaactagctatggtcccgtgtacaaatgacataggaactatggtgcattctcagtaccaatttagtgtacgaatgacatgggaagtctggtgcattctcagaaccaatttatgctatacatgagatagagcacagggaagtct

SEQ ID NO: 1016 - DNA, 706 bp, Triticum aestivum
tggaatgaatagattcgtagataggacctcatcccattgatcgctgagacacaggtagagttcttgtttcgtgttttcaggtaattaagctggtatccatttaagtttgaatatttttattgatctagctgctgtttgtgtagcgggttatgatggagcagttggctttctatcaacatcaagacaagcagctgctgacccccacagggacttgagactgaacattgatgaaatgagttatgaggaactgttggccttggaggaatccataggtactgtgaacaccggccttgccgacgaaaagatttcaggttgtgtgaaagaagtggtctgttgcagttctgatgaggagcaagacgaggaagatgatgggcgctgtctagtctgcctggaggagtacaaagacaatgatctcctagggatactgaagtgcaggcacgacttccacaccgactgcatcaagaagtggttgcaagtgaagaacgcatgcccggtatgcaaatccgccgcggcttagggctggagaggaagcagaataaccgatgttcctctccattgattctagattgagattgagttatgcggtccccggtccattctttggtgcctgagccatggaaataagtgcgctaggacgacttgtttcgtgggttgctgtagctgtgttatcatgtcttgctgtaaaaactttcattcaacaagcaat

SEQ ID NO: 1017 - DNA, 1110 bp, Triticum aestivum
gagggactacggagctcaatctccgagggaagctggtagaccaaatcgagtggctccctgtctcacttgggaagttgcaagatgttactgagcttgatatatctgagaacaggatcatggcactcccatcaacagttggtagccttagatatttgacaaagcttgacatccattcaaaccagttgatcaatctgcctgatacatttggggagctatctagcttaattgatcttgatttgcatgcaaaccagctgaagtctcttccggtatcatttggaaatctcacaagcctagcaaaccttgacctgagctcgaatcagttcaagatactgccagactgtataggaaaattaatgaacttgagaagattatagctgagacgaatgagcttgaggagctaccctatactatagggtcttgcatatctcttgtggaacttagattggacttcaaaccagttaaaagcccttccagaaggtattgggaagttggaaaagctagaaattctcactttgctgatttaagagcactgccaagatcaataggaaatcttgagatgcttgaggagttagacatcagcagcaaccagataagaatgctgccagattcattcgagttccttgcaaagcttcgtgtatttcacgccgacgagactccactagaagtaccaccaagagaagttatcaagttaggggctcaggcggtggtccagtatgtggctgatatggttgcttcaagaggagcaagccagaagaaaagagacgggacaagcttctgggcctggttccgctcactgtttggttgctgcaaaaaagatgaagaactgggattggttccagcttagctgaagcatttcgtctgtatgtatcatcatgctttgttcatgtcccaggtcagcaatgaaaggaaggttgtctttcatgtttgtattcttcctatgttgtgatttgtgtgtgtatgtgtagttttcttgtaaaggttcatcgtattcacttctgtgtgtaactccacctgtattatgagatagcgtatgaccctcaattacattaaacatgtctatctaaatttgtatgcgatctgtcttaagtactactgtagtcctgatgcact

SEQ ID NO: 1018 - DNA, 1119 bp, Triticum aestivum
tttgcatccctgttccagatggtggtgttggttttgactaccgcctgcatatggctgtagcagataaatggattgaactcctcaagcaaagtgacgaatcttggaaaatgggcgatattgtgcacaccctaacaaatagaaggtggcttgagaagtgtgtaacttatgcagaaagtcatgatcaagcactagttggtgacaagactattgcattctggttgatggataaggatatgtatgatttcatggctctggataggccttcaactcctcgcattgatcgtggcatagcattacataaaatgatcaggcttgtcaccatgggtttaggtggtgaaggctatcttaacttcatgggaaatgagtttgggcatcctgaatggatagattttcccaagaggcccacaaactcttccaaccggcaaagttctccctggaaataacaatagttatgataaatgccgccgtagatttgatcttgaggaaaaatatgggtttatgacatctgagcaccagtatgtttcacggaaacatgaggaagataaggtgatcatcttcgaaagaggagatttggtatttgttttcaacttccactggagcaatagcttttttgactaccgtgttgggtgttccaagcctgggaagtacaaggtggccttggactccgacgatgcactctttggtggattcagcaggcttgatcatgatgtcgactacttcacaaccgaacatccgcatgacaacaggccgcgctctttctcggtgtacactccgagcagaactgcggtcgtgtatgcccttacagagtaagaaccagcagcggcttgttacaaggcaaagagagaactccagagagctcgtggatcgtgagcgaagcgacgggcaacggcgcgaggctgctccaagcgccatgactgggaggggatcgtgcctcttccccagatgccaggaggagcagatggataggtagcttgttggtgagcgctcgaaagaaaatggacgggcctgggtgtttgttgtgctgcactgaaccctcctcctatcttgcacattcccggttgtttttgtacatataactaataattgcccgtgcgcttcaacatgaacatataatattct

SEQ ID NO: 1019 - DNA, 733 bp, Triticum aestivum
ccccacgcgggaggcgagaccgaccggcgacgcgcggccagccctgaattgaatcagctaccatggcggccttgccattggctacagctgaagtctgcgacgccaactcgcacctcatcaccggcggcgagctgcgcgcgctgcagcccgtcttccagatctacgggaggcggcaggtcttcgcgggccccatcgtgacgctcaaggtgttcgaggacaacgtgctcgtccgcgagttcctggaggagaagggccagggcagggtgctggtggtggacggcggcggcagcctgcggtgcgccatcctgggcggcaaccccgtccagcaggcgcagaacaacgggtgggcggggatcgtggtgaacgggtgcatccgggacgtggacgagatcaacgggtgcgacatcggcgtgcgcgccctcgcctcgcaccccatgaaggccaacaagaaggggatgggcgagaagcacgtcccggtcaccatcgcgggcaccaggatctgcgacggcgagtggctctacgccgacaccgacggcatcctcgtctccaggaccgagctcatcgtgtaggagaggccgccgcctcgttgtccgtgttgttccactatgtggttgtagttgcttgaattgaatgatgttgtatctcaacttgagattcagaagctctgaacttgtaataactgtaagcttaaattgcctgatcaaatggaatgaggaatgggaataaaattatc

SEQ ID NO: 1020 - DNA, 627 bp, Triticum aestivum
tggggatgaagcggcactctctgctggttcgcatcatacaaggacagagttcctctaaactggaaggcctgaagagcagttttgttaaggaagttactggattcatttcatttctagctgcactcaggagtcgggcgaggtgacatttttcagagaagagaattcctcaaactggaaaacataagttggcatgggaacaatctatctgaaccacgatgggaagatcctactagcaagttcctttgcatgcacataatcgcagaaaatgatgttaatacaccagagttaaccagaggtaacttgtacatatgtttcaatgcaaatgaggaaccagcaagtgctacattacctgctcctgcagaaggatctgtgtggctacgtttggttgatacatcacttgcgcttccaggtttctttacaactgagtctaatctgaaagtacaccaagtgctagtatattcatcttatgaagtaaaagcgcacagttgtgttttatttgaatcaaagagggatctcccccagtttctctgataaagtagttagtctgttgacgcctacttcctactttcagagctatggctggaataagttgatctgtactgtggctgcgaatgtttatgataataa

SEQ ID NO: 1021 - DNA, 884 bp, Triticum aestivum
ctttttatcctttctttagaggtcatgctcaccatgacaccaagaggcgggagccatggttatttggagagcgaagaactgccctcatgagggaggcaatacatatgcggtattcattgttgccctactattactctctgttccaagaggctagtgtaactggtgttcctgttatgcgtcctttgtggttggaatttcctgacgacaaggaaacatataataatggtgaggcttttatggttgggccaagcattttggcccaaggaatttacgaagagggccagaaatcagtgtcggtttaccttcctggaacggagttatggtatgacttgagaaatggatctccatacaagggaagtgtgtcacacaagctgcaagtttcagaagatagcataccaagcttccaaaggtccggcacaattgtgccaagaaaggatagattcaggcgcagttctactcagatggtgaacgatccatacacctggtgatagccctcaataactctggttctgcagaaggtgaactttatgtggatgatgggaaaacttatgattatcagcaaggggcattcatccatcggcgttttgtatttgcagacaataaactaacttcgatcaatattgcgcctgatagtctgggcaagaaggtatattcaactgagtgtgtgattgaacgaattatagtgcttgggttatcatcgggagcaaagaaggctatcattgaacctgggaaccaagaagtggaaattgatctgggaccgattagtttaaggagtggttcaaagtctgttgcgccaacagtcaggaggcccaatgttcgtgttgtagatgattggacgataaggattgcatgatatgcagcccattcacatatggagcctgatg

SEQ ID NO: 1022 - DNA, 1374 bp, Triticum aestivum
ttcatctgttggatctctgaagtcaagaacccaccactgataatcttgttctgcagcagactaggcttgagtgatgggggaagccgccggcgaccgtgtcctcagccgcctccacagcgtcagggagcgcatcggcgactccctctccgcgcaccccaacgagctcgtcgccgtcttcaccaggttggtcaaccttggaaatggaatgctgcagtcccaccagatcattgctgaatacaacaccgcaatccctgaggcagagcgcgagaagctcaaggacggcgcctttgaggatgtgctcagggcagcgcaggaggcaattgttatctcgccgtgggtcgcgcttgccatccgtccaaggcctggtgtctgggagtatgtgagggtcaacgtgagcgagctcgctgtcgaggagttgagcgtccctgagtacctgcagttcaaggaacagcttgttgaaggaagcaacaaggactttgtgcttgagctggacttcgagccattcaatgcctccttccctcgcccttcgctgtccaagtccatcggtaacggcgtgcagttcctcaacaggcacctgtcatcgaagctcttccatgacaaggagagcatgtaccccctgctcaacttcctccgcgcacacaactacaagggcatgactatgatgttgaacgacagaatccgcagcctaagtgccctccagggagctctgaggaaggccgaggagcatctgtctggtctcccggcagacaccccgtactcggacttccaccacaggttccaagaacttggtctggagaagggttggggtgactgcgccaagcgtgcgcaggagacccttcacctgctcctcgaccttctcgaggctcccgacccgtccacgctcgagaagttccttggcacaatcccgatggtgttcaatgttgtcatcctctcgccgcacggttactttgcccaagccaatgtcttggggtaccctgacaccggaggccaggttgtctacattctggatcaagtccgtgctatggagaatgagatgctgctgaggatcaagcagcaaggccttgacatcacaccacggatccttattgtcaccaggcttctcccagatgcaaccggcacgacctgcggtcagcgtctggagaaggtcctcggtacagagcacacccacatccttcgtgtgccattcagaactgaaagtggaattgttcgcaagtggatctctcgttttgaagtctggccgtacctggagactttcactgaagatgtggcacacgagatctctggagagctccaggccaatcccgacctcatcatcggaaactacagcgatggaaaccttgttgcgtgcttgcttgcacacaagatgggtgttac

SEQ ID NO: 1023 - DNA, 749 bp, Triticum aestivum
aaagagtattccttgtgattttatggcgtcataaaaaccagcagcctgttttacttgaaaagggggaactgttagcaatcatgatgagttgatgtccaatttctttgctcagcctgatgcacttgcttatggaaagactcctgaacaattacacagtgagaaagttcccgaaaatcttatccctcataagacttttcagggcaaccggccatcactgagtttcttgctgtcttcattatctgcctatgagattggacagcttttatccatctatgagcaccggatagcagttcagggtttcatatggggaatcaactcgtttgaccagtggggagtggagctgggcaagtcactggcttctacagtgaggaaacagttgcatgcatcacgcatggaaggaaagcccgtcgagggcttcaaccccagcagcgcaagtttgctcacacggtttcttgcggttaaaccatccaccccatatgacacgacagtgcttccaaaagtgtaagctgagggaggtttagtcttaaaaaaaaacaagtgtaacctgaggttgagccgataatcgacaagctaggttgagcttgtggcataacaagttttcttccttctttctcgcgacttgttacaaccagtctggttgtactgtaattttgaagttcctcttgctccagcttggagaaagataagtaaactatgacgataatgaaataaatacatcgacttgtgacagcaaaggtgaaagcactctg

SEQ ID NO: 1024 - DNA, 657 bp, Triticum aestivum
ggcatggtggtagtgcaaggagtagaaggatgagggattcctatcatgctttcatcctttgatgatcgaggagaataacctaggaagatcggcagctgagcgttttatgatgctggaccagttggtcatccacgaatctagagaagcattagatcctcactgggacatgagactggacattgatgacatgagctatgaggagctcctggcgttggaagaacgaattggcaatgtaaacactggcctggctgacgaaaaaatctcaggctgcgtgatggagctagcctgtcgtaattctgcccgtacacagaatgatcaagacaaggaaaggtgcataatttgcctggaggaatacaagcacaaggactcccttgggaagctgaaatgtgggcatgacttccatgcgggctgcatcaagaagtggctggaggtgaagaacgcctgcccggtttgtaaagccgacgccgcaaatgaaaccacctgagggaccaagtagtgcgcccctccacatttatcctagttcaggaatttcagttatatctgctcattgtgctgctcaagttgtctgtgtaaataataattaaagtcctaaagttaggattgttttgtgaactcaaaacatcgtgcccgatgtaagtatgaatctctaagcaagtt

SEQ ID NO: 1025 - DNA, 562 bp, Triticum aestivum
cttcaatgcagttggacaaatagaattctataataagcagtttccagagcagatgctaaccctagcaggatccctctttttcgttacgttagctggagcaaactacttgagtactgctctggcaaacattacaaggaaagtgactaccagagatggccacacaagctggttgacagatgacattaatcttggcaagcttgattattacttctatttcattgccctcataggagtactgaaccttttctacttccttatatgctcacactactatcaatataaatccatgtcactccatgctgaagagtccatcaaagtacacaccaaggaagaggcagaagcagaggtcaacgccaatacagatgcgcctaaaaaataagtattgggagggaaatttgtcctgcagagagtatatacttggaaaattgtcaacagactttcctgttttgcaatatggcacaggactttattatcttttttaatgtgatgaagaactaatgtagcgtagtttagccagatgtatgactgttatccaaagagcatcaatgaagagctaaaaggt

SEQ ID NO: 1026 - DNA, 1267 bp, Triticum aestivum
catatggctgttgccgacaaatggattgaacttctcaaaggaaacgatgaagcttgggagatgggtaatattgtgcacacactaacaaacagaaggtggctggaaaagtgtgttacttatgctgaaagtcacgatcaagcacttgttggagacaagactattgcattctggttgatggacaaggatatgtatgatttcatggcgctgaacggaccttcgactgacctaatattgatcgtggaatagcactgcataaaatgattagacttatcacaatgggtctaggaggagagggttatcttaactttatgggaaatgagttcgggcatcctgaatggatagactttccaagaggcccacaagtacttccaagtggtaagttcatcccaggaaacaacaacagttacgacaaatgccgtcgaagatttgacctgggtgatgcagaatttcttaggtatcatggtatgcagcagtttgatcaggcaatgcagcatcttgaggaaaaatatggttttatgacatcagaccaccagtacgtatctcggaaacatgaggaagataaggtgatcgtgtttgaaaaaggggacttggtatttgtgttcaacttccactggagtagtagctatttcgactaccgggtcggctgtttaaagcctgggaagtacaaggtggtcttagactcagtacgctggactctttggtggatttggtaggatccatcacactgcagagcacttcacttctgactgccaacatgacaacaggccccattcattctcagtgtacactcctagcagaacctgtgttgtctatgctcctatatgaactaacagcaaagtgcagcatacgcgtgcgcgctgttgttgctagtagcaagaaaaatcgtatggtccaatacaaccaggtgcaaggtttaataaggatttttgcttcaacgagtcctggatagacaagacaacatgatgttgtgctgtgtgctccccaatccccagggcgttgtgaagaaaacatgctcatctgtgttattttatggatcagcgacgaaacctcccccaaataccccttttttttttgaaaggaggataggcccccggtctctgcatctggatgcctccttaaatctttgtagccataaaccattgctagtgtcctctaaattgacagtttagaatagaggttctacttttgtatcttctttttgacagttagactgtattcctcaaataatcgacatgttgtttactcgaagatgagaaataaaatcaga

SEQ ID NO: 1027 - DNA, 1102 bp, Triticum aestivum
aggagcgatggggtgcatctcctccaaggtactgagcaggtcggggagcctgcgggagaaggccaatcaggggctccagaggagcagcctggtcgaggagatcatcctctccaactccaagagaaacggcgaccagttcctcgccctcctccgcacctccagctccgccgccaggagcagcaaggtcgacgccgtcgagcagagcccggagcctgcctcggcggcggccaagatcgagacgatcaacgtgtctgaccttctcgccgggctggaggaggagaacaccgcggaaggtgccgaggagcgggacgatgatcggaaatcagacggcggcaaaacttcgtcgcttcggtatgcatacgatgtcaccgccgggagggcggtcagcttccgcacgctggaggagttcgacgcgctggtttcgcggtgcggctcgccggagaaagcggagcctgcaccagcaccagcgcctgaaccagacgcgtcggtggaggtggagccgccggcgcagagcagctgcacggagcaagacgcgatggccaccgccagcagcgctccggaactaggggagacgcccggcggcgcgaagaggcgggccagggcgaggcagctcggtgagctgagcgcggcgccgggcttcgacttcagcaagtccggcagcctgagggactggctgctcggcggcgggcagatgttctcgccgggctcctacgtcacgcccaagttcggcagcgtaccggcggcaccgcccgagtcggcagaacacggagagcgcgcggtgtttgatccggagctggtggcgcagctggaggaggccatggaggagctctcggtggacgaggagcgcgtgctgagggaggtcttggaggtaatcgaagcgggagaaacacagaggttggagagggatgccccggaagtgttggcggtgattgtgcaggattaggcgtcagcttgatgatgattttggtagcttttgttgccgttctagagtgcttgtgatgtgatttgtgaatcctttctaaggagaaatgtacagcaaagatttttttatttaattttttcgtgttgtttctccaacatgtccagaagcttgtcattttaa

SEQ ID NO: 1028 - DNA, 1064 bp, Triticum aestivum
cttacctccctccatactgagattgaggagctactcttcagtgatattgagaatgctgagcacaaatttgtgctgaaggacaagaagaagccgatcatcttctcgatggctaggttggaccgtgtcaagaatatgactggcctggtagaaatgtatgggcggaatcctcgcctacaggagctggtaaacctagtggttgtctgtggtgaccatggaaaggtgtccaaggacaaggaggagcaggcagagttcaagaagatgtttgatcttattgaacagtacaacctgattggacacatccgctggatctctgctcagatgaaccgtgtccgcaatggtgagctctaccgctacatctgcgacatgaagggagcctttgtgcagcctgctttctatgaggctttcggtcttactgtgatagaggccatgacatgtggccttccaacattcgccactgcatatggtggtccagctgagatcattgtgaatggtgtgtccggctaccacatcgatccttaccagaatgacaaggcctccgcactgcttgtggacttctttgggaagtgcaaggaagacccgagccactggaacaagatctcgcagggaggactccagcgcatcgaggagaagtacacctggaagctgtactctgagaggttgatgaccctttctggtgtctatggtttctggaagtacgtctccaacctcgacaggcgcgagactcgtcgctaccttgaaatgctctacgccctcaagtaccgcaaaatggctgaaactgtcccattggctgttgagggcgagacctcgggcaaatgatttgttcttaccagagaaataaatggcgggcgagcgctccgctttaccgttcttgattcagtgatggagcacagatcggagggtgttatgcctttgcttgtcctttgttaccgttcttgattcagtgatgaactttttcctgttgagtccccgtgttgtcgcggtaggggaactggatggatgctgtgttgttggtactttctcatggatacagtatttgaatgaatgaataagatagtctttgtttt

SEQ ID NO: 1029 - DNA, 792 bp, Triticum aestivum
gcagccgccgccagcagctgcgcaaaggctcgacaaaccctaaccctagctccatagctagcttagcttccttcctctcgatctagctagagccatggcgccgaccaagggcgaggggccggccatcggcatcgacctcggcaccacctactcgtgcgtcggcgtgtggcagcacgaccgggtcgagatcatcgccaacgaccagggcaaccgcaccacgccctcgtacgtcgccttcaccgatctcggagcgcctcatcggcgatgccgccaagaaccaggtcgccatgaaccccagtcaacgccgtcttcgatgcgaagcgtcttatcggcagaaggtttgctgatgctcctgtccagagtgatattaagatgtggccgtacaaggttattcctggcccagcagacaagcctatgattgtagtgcagtacaagggtgaggacaaccagttttcagctgaagaaatttcttccatggtcctcatcaagatgcgtgagatcgccgaggcttacctaggagtaactattaagaatgctgttgtcacccgtgcctgcttacttcaatgattcccagaggcaggcaaccaaggatgccggtgttattgctggtcttaatgtgatgcgtatcatcaaacgagccaacagcagctgcaattgcctatggtcttgacaagaaggctaccagtgtcggtgagaagaatgtgcttatctttgaccttggtggtggcacttttgaatgtctctctccttaccattgaggagggatttttgaggtgaagcaccggctggtac

SEQ ID NO: 1030 - DNA, 1061 bp, Triticum aestivum
gcggtcggaggtctctaccttcctccgatcgggtgcctgtggactgtggtcgccaagccagccatggcctccttcccctccgtctccgtggcgagggcgaggccgagacccttcctcctgctggcggcggcggtggtcgcggtggcggtgctcgcgcgcggcgcccacgcgcagctctccgcggggttctactcggcgagctgccccaccgtgcacggcgccgtgcgccaggtcatgtcgcaggccgtcatcaacgacacgcgcaccggcgccgccatcctccgcctcttcttccacgactgcttcgtcaacggctgcgacgcctcgctgctgctcgacgacacggccacgacgcccggcgagaagagctccggccccaacgccggcggctccaccttcggcttcgacgtcatcgacaacatcaagacgcaggtcgaggccgcctgccccggcaccgtctcctgcgccgacatcctcgccctcgccgcgcgcgacagcgtcaacctgctgggcgggccgagctgggcggtgcccctggggcggcgcgacgcgacggccccggacccggacggggcgaggacgctgccgggcccggacctggacctcgccgcgctcgtctccgccttcgccgccaaggggctcacgtcgcgcgacctggccgcgctctcgggcgcgcacacggtcggcatggcgcgctgcgtgcagttccgcacccacgtctactgcgacgccaacgtgagcccggccttcgcgtcgcagcagcggcagctctgcccggcctccggcggcgacgccagcctcgcgccgctcgacccgctcacccccaacgagttcgacaacggatactaccggaacctcatgtccggcgccgggctgctgcgctccgaccaggagctcttcaacaacggggctgtggactccctggtgcgcctctacagcgccaaccccgccgccttctcggccgacttcgccgcctccatgatcaacctcggcaacgtcagcccgctcacgggggccagcggggagatcaggctggattgcaggaaagtcaatacttgatt

SEQ ID NO: 1031 - DNA, 906 bp, Triticum aestivum
caggttttcaccacctaccaggaccagcagaccccgtctccatccaggtctttgagggtgagcgtagcatgaccaaggactgccgtcttctcggcaagttcgacctttctggcattcccccagctccaaggggcactcctcagatcgaggtcaccttcgaggttgacgccaacggtatcctgaacgtgaaggccgaggacaagggcacgggcaagtcggagaagatcaccatcacgaacgagaagggccgcctgagccaggaggagatcgaccggatggtcaaggaggcggaggagtttgccgaggaggacaagaaggtgaaggagcggatcgacgcccggaaccagctggagacctatgtctacaacatgaagaacacggtgggcgacaaggacaagctggcggacaagctggagagcgaggagaaggagaaggtggaggaggccctcaaggaggcgctcgagtggctggacgagaaccagacggccgagaaggaggactacgaggagaagctcaaggaggtggaggccgtgtgcaaccccatcgtgtcggccgtgtaccagaggtccggcggcgcgcccgggggcgagggcgccgacggcggcgtcgacgacgaggaccatgacgagctgtagatggtttgtgaaccaatttttgtaatggtagggtggagaggacatggataattggtactgctgcttactaaggtctggggttgttgggggtggtcgggtttattcgcagacaccggtactgttgttagtctgttggccgagctgtagagaactctttgctgctgctgttacttccttctgatgttttttcgttttgttattatatagccggatggattcgcatcggaactttatgtgaagaatagatgatgcagtttatctatacctcctg

SEQ ID NO: 1032 - DNA, 580 bp, Triticum aestivum
tgcccagatctacgtcgactcagctaccgccgttcgtcttggcgagctctacgaccggaccgacagctgtctcgcgaactgggtgcggggcgtcggcgcgccggccacggcgtttgacttccccaccaagggcgttctccaggaggccgtccagggcgatctggggaggatgcgcggcagcgacggcaaggcgcccggtatgattgggtggatgccggagaagaccgtcacgttcatcgacaaccacgacactgggtcgacgcagaggctgtggccattcccctcggacaaggtcatgcagggctacgcctacatcctcacacacccgggcataccatgcatcttctacgaccatgtgttcgactggaaactgaagcaggagatcaccgcactggctacggtcaggtcaaggaacgggatccatccgggtagcacactggatatcctcaaagccgagggcgatctctatgttgccaagattgggggcaaggttataaccaagatcgggtcaagatacaatattggcgacaatgtgatcccctcgggtttcaagattgcagctaaaggcaacaactattgt

SEQ ID NO: 1033 - DNA, 1365 bp, Triticum aestivum
ctcctcttcgagagcacagctagatagagctgaagaacatggcgagcaaacactcgtccctctccctcttcctcgtcctccttggcctgtcggccagcttggcctccgggcaagtcctgtttcaggggttcaactgggagtcgtggaagcagagcggtgggtggtacaacatgatgatgggcaaggtcgatgacatcgccgccgccggagtcacccacgtctggctcccgccgccgtcgcactctgtcgccaacgaaggttacatgccaggtcggctgtacgacatcgacgcatccaagtacggcaacgcggcggagctcaagtcgctcatcgcggcgctccacggcaagggcgtgcaggcgatcgccgacatcgtcatcaaccaccggtgcgccgactacaaggacagccgcggcatctactgcatcttcgagggcggcacctccgacgccgcctcgactggggcccccacatgatctgccgcgacgacaccacctactccgacggcacagccaacctcgacaccggcgacggcaagcctaactacgaccaggacgcgcaccggcagaatctggtgaactgggtggacaaggtgggcggcgcggcctcggccggcatggtgttcgacttcacgaccaaagggattctgaacgccgcggtggagggcgagctgtggcggctgatcgacccacaggggaaggcccccggcgtgatggggtggtggccggccaaggccgtcaccttcgtcgacaaccacgacacgggctccacgcaggccatgtggccattcccctccgacaaggtcatgcagggctacgcgtacatcctcacccaccccggcatcccatgcatcttctacgaccatttcttcacctgggggttcaaggacgagatcgcggcgctggtggcgatcaggaagcgcaacggcatcacggcgacgagtgcactcaagatcctcatgcacgaaggggacgcctacgtcgccgagatcgacggcaaggtggtggtgaagatcgggtccaggtacgacgtcggggcggtgatcccggcagggttcgtgacctcggcacacggcaacgactacgccgtctgggagaagcccggggccgcggcgacactgcagcggagctgaagtctccactgaccggagatgatctgatctacattgtccattctgctacacacacgcagatattgttgtggtttaacttatgtatacttgtacccaaaattgatgagctctacgaatggctcagcacgaatgtagtaaataattattgaggatatgaagaggtataagaggcgattgcgccatttggatgcttcagcatatataaataaatgaaaaggaaaagacagttgcac

SEQ ID NO: 1034 - DNA, 671 bp, Triticum aestivum
caaggtgggcggctccggccccggcaccacgttcgacttcaccaccaagggcatcctcaacgtggccgtggagggcgagctctggcggctgcgcggcaccgacggcaaggcgccaggcatgatcgggtggtggccagccaaggcggtgaccttcgtggacaaccatgacaccggctccacgcagcacatgtggcccttcccttctgacagggtcatgcagggatacgcctacatcctcacgcaccctgggaccccatgcatcttctacgatcatttcttcgactggggcctgaaggaggagatcgatcgcctggtgtcaatcaggacccggcaggggatacacagtgagagcaagctgcaaatcatagaggctgacgccgacctttacctggctgagatcgacggcaaggtcatcgtcaagctcgggccaagatacgatgtcgggcacctcattccccaaggcttcaaggtggtcgcgcacggcaatgactatgccgtatgggagaaaatataagcaaaattatccaagcagctccacaattttttttcctatatatgaatgccacacctattagtccgagctcgtgttgtccacatagtacgattttagtacttcctccatgtaaaagtgaggatgagggacatccattgtatttttcataaataataat

SEQ ID NO: 1035 - DNA, 711 bp, Triticum aestivum
gtcgctggcgtacggcggggacggcaagccgaacctcaaccaggacccgcaccggcaggagctggtgaactgggtgaacaaggtgggcggctccggcccgggcaccacgttcgacttcaccaccaagggcatcctcaacgtcgccgtggagggcgagctgtggcggctgcgcggcaccgacggcaaggcgccgggcatgatcggatggtggccagccaaggcggtgaccttcgtcgacaaccacgacaccggctccacgcagcacatgtggcccttcccttctgacagggtcatgcagggatacgcctacatcctcacgcacccagggaccccatgcatcttctacgatcatttcttcgactggggcctgaaggaggagatcgatcgcctagtgtcaatcaggacccggcagggcatacacagtgagagcaagctgcaaatcatagaggctgacgccgacctttaccttgccgagatcgacggcaaggtcatcgtcaagctcgggccaagatacgatgtggggcacctcattcccggaggcttcaaggtggccgcacacggcaaagactatgccgtatgggagaaaatataagaaaattaccagagcaactctgcaaattagtcatgttgtccacatagtacgattttagtacttcctccatgtaaaagtgaggatgagggacatcaattgtatttttcataaatgagaat

SEQ ID NO: 1036 - DNA, 557 bp, Triticum aestivum
  misc_feature (236)..(390): n = any nucleotide
acggcgagatcctcgagtccagatcatcaacgatcgggagacggggagtcgccgggttcggttcgtgacgttctcgagcgagcagccatgcgcgacgccatcgaggggatgaacggcaaggagctcgacggccgcaacatcaccgtcaacgaggcccagtcgcgccgctccggaggcggaggcggcggtggctacggccagcgcggcggaggcggaggctacggtgcggcggctannnnnnnnnnnnnnnnnnnnnnnnnnnnnnnnnnnnnnnnnnnnnnnnnnnnnnnnnnnnnnnnnnnnnnnnnnnnnnnnnnnnnnnnnnnnnnnnnnnnnnnnnnnnnnnnnnnnnnnnnnnnnnnnnnnnnnnnnnnnnnnnnnnnnnnnnnncggtggggccctcatggccaagttatctatctatctaatcgagctaccatcatcatcatccgatcgttatcatcgttagttttgtgtggaactatctagtttgtgttaactgtgtggttgcccatctgtgtttttgatcgcaagaagaaagctcgtctcgtttgctt

SEQ ID NO: 1037 - DNA, 565 bp, Triticum aestivum
ccctccctcccccaacaccctgacatccgagctctagtcggtcgatccatggaggcttcacgcaggctcctctcggcggcgctcctcctcgtgctgctgctcgccgccacaggggagctgggagggccggtgatggtggcggaggcgcggacgtgcgagtcgaggagccacaggttcagggggccctgcgtgcgcaggtccaactgcgccaacgtctgcaagaccgagggcttccccgacggcaagtgccgcggattccgacgccgctgcttctgcaccacccactgccaccattaacaagcctctctcctccgggtgatgccttcttccgcctcggccttcagggtggcctttctgcgagcgtccgtgcgtgtgcgtgtccatgaataaatcttagcttgtctcggcaagctgggtgcgagtcccttgtttgttttttgtatgattattaccagtgtgcatgcgttgttgtttcttgttgggtttatgggattatcccggccggtcaatccttctctcatgtagtaagattttattttgggcaaatcatgaatgttgtatgcta

SEQ ID NO: 1038 - DNA, 651 bp, Triticum aestivum
cgcgcatcgaatcgatcgctcttatcgcctcgaacgtatcgaagcccaggagaggagagcggagcagccgacgagccgccgatcgacatgggtctcaaggaggagtttgaggagcacgcggagaaggccaagacgctgcccgacaccaccaccaacgagagcaagctctgcctctacggcctctacaagcaggccaccgtcggccccgtcaacaccgcccgccccggcggcctcttcgatatggctggcaaggccaagtgggatgcttggaaggccgtcgaagccaaatccaaggaggaggccatggcggactacatcaccaaggtgaagcagctgctggaggaggctgccgccgcatccgcttaatcctaggccacaagaccgcaatcgctattgctatcctggtggtgcagacatgtgtgccagcaaacacaaataaatttcaagtactagttgttgtcgagcttatcgccgtcgtgggtgtaattacgttgaacaagaagccctgtgatacatgaaagtgcaatctcagtttacgccatgattgattaatactcctacatgtcttctgttgttaagatgtttttttcctttggggaataccggttcctgataaattcttctgaattctaattctatcctgtttgttgg

SEQ ID NO: 1039 - DNA, 888 bp, Triticum aestivum
ctggtattgtgctcgactctggtgatggtgtgagccacactgttccaatctacgagggatacacgcttcctcatgctatccttcgtttggaccttgctggccgggacctcacggataatctaatgaagatcctcacagaaagagggtactccctcacaacaaccgctgagcgggaaattgtcagagacataaaggagaagctcgcttacgtggcccttgattatgacaggagctgaaacggctaggagcagctcctctgtggagaagagctatgagatgcctgatggtcaggttataacaattggttcagaaaggttcaggtgccctgaggtgctgttccagccatctcatgttggtatggaagttcctggtatacacgaagcgacatacaattccatcatgaagtgtgatgttgatatcagaaaggatctgtatggtaatgttgttctcagtggaggttctaccatgtttcctggaattgctgatcgcatgagcaaagagatcacggcccttgctcctagcagtatgaaggttaaagttattgcaccacctgaaaggaaatacagtgtctggatcggtggctctattttggcctctcttagcactttccagcagatgtggatctccaaggcggagtacgatgagtctggtcccggcattgtccacatgaagtgcttttgaagagtcggtgaaggggacttacaaaggggacttgctgccaagaatatatagtagtacatggtacatggttagtgttctgtagaagatgtgtaccctcagaggaataaggggtacaggaaaaaaatcagtatcggttcatcttttccgtttggcacaattgcatggtgcttgcctgctgtatgaaataatgaaatggaacgtatgtgt

SEQ ID NO: 1040 - DNA, 588 bp, Triticum aestivum
catgtcgccgtcatcacggcctggtgaacgtgttcgccacgctggtgtccgtcttcaccgtggaccggctggggcggcggaagctgttcctgcagggcggctcgcagatgctggtgagccagctggtggtgggcaccctgatcgcggtcaagttcgggacgagcggcgtgggggagatgcccaaggggtacgcggcggcagtggtgctcttcatctgcctctacgtggccgggttcgcgtggtcatgggggcccctggggtggctggtgcccagcgagatcttcccgctggagatcaggcccgccgggcagagcatcaacgtgtcggtcaacatgctcttcaccttcgtcatcgcgcaggcgttcctcaccatgctctgccacatgaagttcggcctcttctacttcttcgccggctgggtggtcatcatgaccgtcttcatcgcgctcttcctgccggagaccaagaacgtgcccatcgaggagatggtgctcgtctggaagggccactggttctggcgcaggtacatcggagacgctgacgtccacgtcggcgccaacaacggcaagggcgccgccatcgcataga

SEQ ID NO: 1041 - DNA, 1423 bp, Triticum aestivum
  misc_feature (1255)..(1255): n = any nucleotide
aagagacacgggctctgcgcatggcagactttgatgatgaggagatgaacatgtcaacatttcccaagaggttcggtaactcaaacttcctcatcaactctatcccgattgccgagttccaagggcgcccgcttgctgatcaccctggtgtcaagaatggccgtcctcctggtgctctcactgtcccccgcgaccttctcgacgcctccacggtcgccgaggccatcagtgtcatctcatgctggtatgaggacaagacagagtggggtcagcgtgtcggatggatttacggttcagtcacagaggatgttgtcacaggctaccggatgcacaaccgtgggtggaagtcggtctactgtgtcaccaagcgcgacgccttccgcggcaccgcgcccatcaacctgacggaccgcctccaccaggtgctccggtgggccaccggctcagtggagatcttcttctcccgcaacaacgcgctgctggcgagccggaggatgaagtgccttcagaggatcgcgtacctgaacgtgggcatctacccgttcacgtccatcttcctcatcgtctactgcttcctgccggcgctgtcgctcttctcggggcagttcatcgtcaaggagctggacgtgaccgtcctcacctacctgctgtgatcaccctgacgttgtgcatgctgcggtgctggagatcaaggtgtcgggcatcaacctggaggagtggtggaggaacgagcagttctggctcatcggcggcaccagcgcgcacctggccgccgtgctgcaggggctcctcaaggtgatcgccggcatcgagatctccttcacgctcacctccaagtcgggcgccgacgacgagaacgacgagttcgccgacctctacatcgtcaagtggacgtcgctcatgatcccgcccatcgtcatcatgatggtgaacctcatcgccatcgccgtcggcttcagccgcaccatctacagcgagatcccgcagtggagcaagctgctgggcggcgtcttcttcagcttctgggtgctggctcacctctacccgttcgccaagggcctcatgggccgccggggacgcacgccgaccatcgtcttcgtctggtccggcctcctcgccatcaccatttcgctgctgtgggtcgccatcaacccgccgtcgcagaactcgcagatcggaggctccttccagttcccctgatcctacccgtatatcatatatgagttacatgccatttgttccatcagcagcagcngcagcttgctggtggggggagtaaagtaaattctgaccgaccgttccctgtggttaaattaattaggtgtttttttcgtgttgccggaaaatgttggatcataccagtagttcatttgttcttttgattctgttccagagatgtgatgtttggacctggacaacatca

SEQ ID NO: 1042 - DNA, 1713 bp, Triticum aestivum
agcctggatgttctccgtatcataaacgagcctaccgcggcatcgttggcatatggttttgaaaaaaagaacaatgaaacattctggtttttgacctgggaggaggcacctttgatgtttcagttctcgaagttggtgatggtgtttttgaggtgctgtctacatctggtgatactcaccttggtggtgatgactttgacaagagaattgttgattggctggctggaagcttcaagaatgatgagggtattgacctgctaaaagacaagcaagctctccagcgtcttacagaagcagctgagaaggccaagatggaattgtcatcgttgacccaaacaaatatcagtttacctttcatcacagctactgctgatgggcccaagcatattgagacaacacttaccaggggtaaatttgaggagctatgctcggatcttcttgacaggctgaggacacctgtcgacaattctcttagagatgcgaagttgtcacttaaagaaatagatgaggtgattcttgtgggtggttccacaagaattccagctgttcaggatcttgtgaagaaaatgacgggaaaggatcccaatgtgacagtcaatcccgatgaggttgttgctcttggagcagcggtgcaggcaggagtattgtcgggcgatgtgagcgatattgtgcttcttgatgttacgccactgtctcttggtttggagacactgggtggggtgatgaccaagattatcccaaggaatacaaccctccctacctctaagtcagaggtcttttcaacggctgctgatggacagactagtgtggagattaatgttctcaaggagaaagagagtttgttagggacaataaatcccttggtagcttcaggcttgatggaattcctcctgctccacgtggtgttccccaaattgaagtcaagtttgatattgatgccaatggcattctgtctgttgctgcggtggataagggtactgggaagaagcaggacattacgatcactggagccagcacactgccaaaggatgaggtagagaagatggtggaagaagctgaaaaattcgcggcggaggacaaggagaagagggacgcaattgacaccaagaaccaggcagaatctgtgatctaccagactgagaaacaactgaaggagctcggggacaaggtcccaggcgatgtcaaggagaaggtggaggggaagctcaaggaactccaggtcgccgttgctggtggatcgacacagacgataaaggatgcactagctgcgttgaaccaagaagtgatgcagcttggtcagtccctctaccagcagcaggggtcaggccctacccctggagctgacggcgctgctgactctacaggcccaggcccaggcccatctgagaagacaggcgatggtggtgacgtcatagacgctgattttaccgacagcaattgaatagaacagtaggttaggacatgatgaacaagtgagtatgaatttgttccacatgattgcctagtagtatacggggtgaccgctttctttggattgagaccttgtttcctgtcagggtgttggccgagtttttgatgttggaggtttggagagttcagttatcagtttggatggatagattggcttttgcttgttggttactcgaccccttggctttgtacggttatgtattggatttactaactctctagagaactgggtcatttcctgtt

SEQ ID NO: 1043 - DNA, 734 bp, Triticum aestivum
ttataaggccctcaacgacctagcatgtcctcctccgagggcactctcctgaagcccaacatggtcacccctggttctgactccaagaaggtggcccctgaggtgattgctgagtacaccgtccgcaccctccagaggaccgtccctgctgccgtccccgcctattgtcttcctctctggtggacagagcgaggtaggaggcgatccctgaacctgaacgccatgaacaagctccagaccaagaagccctggaacctgtccttctccttcgggcgtgccctccagcagagcaccctcaaggcctggtccggcaagacggagaacgaggagaaggccagggcggcgttcctggtgaggtgcaaggccaactccgaggccaccctcggcacctacaagggcgacgccaccctcgctgagggcgcctccgagagcctccacgtcaaggactacaagtactgattgatctgccttcggtgctgtggcccgtttgggcgtcccgcttaccagtatcattgtcattgtttggtttcctgagtcctgatatatcctcggatatcgaacatcgtttttaataatatggaacttgtgttttcataataccgtagtagtttctttttggagttgaagtaccctgaaaatcgggtgctgcgtatcgtaaattggagcaggtttttgttccatggtcctgtaatttacctgctcatacaatgttaaaacctgtcatattctgagta

SEQ ID NO: 1044 - DNA, 712 bp, Triticum aestivum
gcgcagtgccgggcgaggtccgggagaagccgctcctcgcgtgccggcagatcctcgagcagcagctgaccggtcgcgccggcgagggcgccgtcggcgtcccgttgtttcaggcgcagtggggcgccagggagcggtgctgccggcagctcgagagcgtcagccgcgagtgccgctgcgccgccctccgcggcatggtgcgggactacgagcagtccatgccgccgctgggagaagggcgccacggctcgtcgggggagcgtcaacaagagcagggatgttccggcgagtccacggagccggagcagcggcaggaggtacaaggggggcagtatggcagtgagacaggaggaagccagcagcagcagcagggaggaggctaccacggggtgaccgtcgggcgtggtggccagcggcaaggacaggtgctctgtcacaagaggccgcagcggcagcagggagaagggttctccggcgagggggcgcagcagaagccgcaggccggtcgcgtgaggttgacgaaggtgcggctgccgaccgcgtgccggatcgagccccaggagtgtagcgtcttctccgccgaccagtactactactaggctagctgattggtcgatgcaatgtgtgagctctgataataagtgtgacctgtaatcacaatcctccatgcggaaatgacagtgataatgaaaaggcaatgaataatgaaatg

SEQ ID NO: 1045 - DNA, 784 bp, Triticum aestivum
gacagaactcgtgcgtgtcggagtgctcgctggacgacgtcgactggaggccgggccggcggctcgagatcaccaaggccagccccgacaaggacgagatgaactgccgcatctgccacctcggcctcgagagcgccgctcgccgagtccggcggcggcatcgtgctcggctgctcctgcaaggacgacctctcctgcgcccacaagcagtgcgccgagacctggttcaagatcaggggcaacaagatctgcgaaatctgcggctcgacagcgtgcaacgtggttggtttcggtgacgcggagttcatggagcagtggaacgagtcaggcaactccgcagctacccaagcaccggcgaacgagatgcggaggttctggcaaggccaccggttcctcaacttcctcctggcctgcatggtgtttgccttcgtcatatcctggctcttccacttcaacgtccccggatgagcctcgtcgcgctgacttgttaataaaaagagcttcaaagacgttgccactggcaaaatggtgggtgtgtcgggtcaaaaacttgaaaagcaatctgggtggaagtgagccgaagagctgggcgatcattgttgaagtggaggtgaaatattggtgaatggtgttgttagttttgtagaaagttggcggtgttgcggccagcagagacggaagaggcaaatttatttgggaaaatgggggcatggtgcgcatcatgctttgtgattctcatgctgggttgcttaattaaatattgttagcaaggtttgaacatgtc

SEQ ID NO: 1046 - DNA, 1064 bp, Triticum aestivum
aatcacggaaaacatacaaggcacgacaagtcgacttatgcgacgaacagctctgcctgcccgaagagttcactaactgaccgtattgaggtgtctgctcaaaacacatgcattggaaaaggaggagctttcactggagagatcagtgcggagcagttggtggacattggctgccaatgggttattcttggtcactctgagcgcagacatgttatcggtgaagatgatcagtttattgggatgaaggctgcatatgccttgagtcaaaatcttaaggttatggcatgcataggagaactgttggaagagagggaagctgggaaaactttcgatgtctgttttaagcagatgaaggcttttgcagataatattacagactggaaaaatgttgtgattgcgtacgagcctgtgtgggctattggaactggaaaggttgcttctccagagcaagctcaagaagttcatgccgctgtccgtgattggttaaaaaccaatgtatcagctgatgttgcttctaccgttagaattatctacggaggttccgtaaatgcagcaaactgtgctgagctagcaaagaaggaagatatcgatggcttccttgtcggcggtgcctctttgaagggtccggactttgccaccatctgcaactcagtaacgtcgaagaaagttacagcctgatgtgagatcaccacctccatggtagaaataagtgatgagaaagagaggcagcctggccaccgcgtcgaaaatgcgtgagataggtgctccatgtgaaccgtgaatcgtgatctggttttgctgattcgtagaacgaagaaatacaaataatacgacgtggcgccattttgcttctcatggaatttctgtacgaaacgggagttttcttctttgtacgtgacaggaatgggagtggtcacactcacacctgaattgaagtgtgctcaggcttgtggaactgttgttctgttgtcggtctccagggggggcatatactgtgtcgtgtgcactgaagtcatactacgtgttgagacaaacagactactccctctgccccgtaatataaa

SEQ ID NO: 1047 - DNA, 672 bp, Triticum aestivum
gagagataccgagagacatcggccgagaaggttccggaaggatgcctcgcgcggggttgtcggcggggtcgagcaaggtggacgtggccatcgacctcgggaacccgctcctcaaccgcaccgtcgacggcttcctcaagatcggcgccgtcggcgcctgcagggtggccgccgaggacgccttcgactgcctccaaagtgggagtgtctcgaagcgcaagcttgagaagacactggaaaaaatgtgcaaggagggcgcatattggggtgctgttgctggagtgtatgtaggcatggagtatggagtggaaagggtccgcggagagtatgactggaaaaatgcattgattggaggcatcgcaagcggcaccctgatctctgctgctagcaacaacaaagggaacaagatcgccaaggatgccatcaccggaggtgccatcgcgaccgccatcgagttcatcaactacctcacctagctgtgagaccatatgcatgtcaatctttttttatcaccaagacgaataagaacttcttgaatgaagccatcccccctctgtgctaataattggagccgttttctccaatgttcttccctttttggttgcccgcgttctcatgtccatgttgtgaacaatttattttcctgtgaagatatcctttgtgctggcctag

SEQ ID NO: 1048 - DNA, 821 bp, Triticum aestivum
tgactctacatctaagacagtttccaaccaaaccagcgttgctgatgggaaacactgtccgacctcagatgatcgcatggtagctgtgtcatgtaaaaatggatatgcagttgatgcagaagatgcgtcggtcagtagcagtgcagatcctgcgaagaacgttttcttgcatgatgcctcggtgaaccatgacaagaaggaaggtgaatcacatacaaatggcatcatcgatgcgccatctcaagtatttccgacagaatttagcacaatgcccgtctctcaggagatcaatgcagtcagcacacatgttgaagaaaagactgacacggaagacaccaaagcaaaagataagactccggtagagaatatagatgactcagaagaaaagaaacagactcaagatgctagtgcaaaggagatgactgcagtactgcactcagataatgttgaagaggataaactggctgaggatactggttcaaaggaagtgacagcagtacaaaagcacagaaaatattcatgaaacggatcagactgaagacggtcgtgcaaagaagatggatggagaatttaacacagctgatgttggtaacaggcagactgatgtcgccagcaaggaagagaataaaacagatgaagtgcaacaggcagataatgctgtagaaaagaagcaggctccagaaactactgcaaagcagacgaacgtggtgcaaagcagggatcatgctgaagagcggaagcaggctgaagaaacagtcggtctggagggaaacaagcagaatggagagatcgccgccgttggctcgaggctgaattcagca

SEQ ID NO: 1049 - DNA, 754 bp, Triticum aestivum
caatcaatggtagattttatcagtttacttcatcggatcagcaagcccaagtaccagcagaatcttccagcaaccaatgattctcaagcagtggcttcagccatattaccccgttgaaagaaaatgggctcttgggctccagtctcgagctcaacctcgtgagataatgatcgaggttctaaaggcacttcaagaaattaaatgtctgctggaagaagaatggacactacacatgaaatgcaggtggtgcctgggtttcctcaggtcagtgatatgttagatgccaaccacagctttgttgatgactctaccatcatggataacggcgatgctaatgggaggctacctgccgtgatcaagtttgaaatccagctttacaagaccaaggatgacaagtacctgctagatatgcagagagttactggacctcagctcctctttctggatttttgcgcggccttccttaccaaccttagggttctatagtatgctgcctcttctggttgagtgatgaatagtgagacatgtgactgtcagcgatgaataagttggtgcctgttctggttgagtgatgaatagtgagacatatgactgtcagagatgaataagtgatggtgtgtaaataggtggtgtgtttcatcttcgttttacccagtccctgacagcgaaccgtgttgtttgggtgactagtcctgtgtgaagcaccaaaagtgttgtttgggtgactagtcctgtgtgaagcaccaaaggttaa

SEQ ID NO: 1050 - DNA, 723 bp, Triticum aestivum
ggttcctgatgcacatgtcaatgagttcaagtcaattgagaaattcaagatcttcaacaccaacaatctatgggtgagcttgaaggctatcaaacgccttgtcgaggctgatgcactcaagatggagatcattccaaacccgaaggaagttgagggcgtgaaagtccttcagttggaaactgcagctggagccgcgatcaggttctttgaccacgcaatcggcatgaatgttccgaggtcccggttcctaccggtgaaggcaacatcagacttgcagctagtacagtctgatctgtataccctggttgatggcttcgttacacgtaatgcagctagaacaaatccatcaaatccctcaattgaacttggccctgagttcaagaaggttgggtgcttccttggccgcttcaagtcgattcctagcattgttgagctcgacagcttgaaggtttccggtgatgtttggtttggttctggcatcgtgctgaagggtaaggtgaccatcacagcaaaacctggtgttaagctggaaatcccagatggaaaagtgattgagaacaaggacatcaacggccctgaggacctttaaatgagcatcagaacatgctgacatcacaatggcagatcaattttactatatagaatctgctatgagtcatacatgcaccatgacattgtggtgaatatctgtgatacagtttgcttcaacataaatacattgaa

SEQ ID NO: 1051 - DNA, 645 bp, Triticum aestivum
gcccccccccccgagtgagaggttcagtccatccccccgtcaccgcgcttgaagatggatcttgcaggctgggggacgacgacgatgtccgtgcgccgctgcctgtgaggcgcgagactctctacggcgacaccccatgattgtgactcggcctaatgcgacagttgcatttcgtaactttgaagaggaggcaagacaatctgcttgggattctgaacagaatgccacatccagttctcgtgataatctggcttctttatatcgcccacctttcgatttgatgttcaatggaccatttgacaaggcaaagttagaggcctcttctctagacaagtggctcttgatcaatttgcagtcaacagaagagttcagctctcacatgcttaatcgagacacttgggcaaatgaagcggtggctcaaacaatcaggtcaaacttgattttctggcaggtttatcaagataccggtgaggggaggaaggtatgcacctactaccatttggtctctgttcctgccattctcctaattgaccccatcactggacaaaaaatgcgtggttggagtggaatggtttacccggacagtttgctggaggatttgatgccttacttggagaaaggtccagaggagcaccatgctgctca

SEQ ID NO: 1052 - DNA, 614 bp, Triticum aestivum
ctaaaggaacaaggagcgtctagcgttggggctgcaggttattgctggggtgcaaaggtagttgcagagttagcgaaagctaatgagatccaggcagccgttatgtcgcacccttcatttgttactgtcaatgatatagaagaggtgaaatgccccatcgctatacttggagctgaaactgacgtaatgtccccaccagaattggtcaagaagttcgagcaggttctatcctctaactcagggattgctcactttgtcaagatattccctggggtttctcatggatggaccgtgagatacaaaagcgaagacgcagctgctgtgaagagcgccgaggaagccctggcggacatgattgactggttcaacaagaacctcaagtgaacctaatgaattggcggccatccttttgtaataagccagtgtcactcttcaggagtcaccacgcgagcatccacggtttatgttatggtcttagctatagcctatagggcatgcgtctttgtctgctgcaggtctgctggtatgtgtgtgcttgctcattttggggtctgcttgtgctgaacactgaaactattgcactcagataaaatgtggtatttgcagttttgtga

SEQ ID NO: 1053 - DNA, 956 bp, Triticum aestivum
tacgagtcagcaaagaggctcagattaccggaacgtgccagcttttgctctggaacacttaccaaatcgaaattccttgatgtatggagacctgtatgggatctccaaagaagcatctaccgtatataggtccactcttcgttacgaaggatttagtgagatcatgactatcctggcaaaaattgggttttttgatgctgaaaatcatccactgctacaagaaactaatcgtccaacatataggaattttctcaatgaactccttaatgtcaataatatctccacatctaacacaaagataaacggtgaagagtctggaggacatgatgatgaactggtttcaagactcatgatgcttgggcattgcaaagaaaaggaactagctgtcaagatactcaaaacaatcaagttcttggggctgcatgaggagacacagattcctaaggattgttcaagtgcattcagtgttatttgccaacgaatggaacagagaatggcctatggccacaatgagcaggatatggtactgctgcaccatgaagtcgaggtggagtaccccgatgggcgacccaccgagaagcaccaagcgacgctgatggagttcggaaagactgagaacggcaggtcgaccaccgccatggccctcaccgtcggggtaccggcagcgataggagccctgctcttgctccagaacaaggttcagaagaaaggggtgatccggcctctgcaaccggagatctacatccctgcgctggagatcttggaagcgtcgggcatcaaggtgatagagagagtggagacctgagaggatgtcaggatgggatgagaatccaccgagtatatatgctgctgcaacagaggcagcgagtaaataaaatatgatgattctcgctgttgtaagtcaaatgagcgaactgtatgtatgtatgtgcctatctattgtgtatataccgaat

SEQ ID NO: 1054 - DNA, 979 bp, Triticum aestivum
cgaggctggacaaggtgaagaacatcactggactagtcgagtggtatggtcagaacaagaaggtcagggacctcgtgaacctcgtcgtcgttgcaggcctcctgaatgctgcacagtccaaggaccgggaagagatagacgagatcaacaagatgcacaatttgatcgacaagtaccaactgaaaggacagattcgctggatcaaggctcagactgaccgtgtccgtaatggcgagctgtaccgttacattgcagatacaaagggtgcatttgttcagcctgctctctatgaagcatttgggctaacagtcatcgaggcgatgaactgcgggctgccaaccttcgcaacaaaccaaggagggccggcagagatcatcgttgatggtgtctcgggtttccacataaacccaatgaacggcagggaggcaggcaccaagattgcagacttcttccagaagtgcaaggaagacccaggctactggaacaaggtgtccactgccgggcttcagcgcatctatgaatgctacacatggaagatttacgcaaccaaggtgctgaacatggggtcaatgtatggcttctggaggactctgaacaaggaagagagagtggcgaaacaacgctacatgcagatgttctacaaccttcagttcaggaatctggtgaagaccgtccccagagtaggtgagcagcctccaagacccgcgaccacgacaggcgcagcggcggagcgtaaccagatcgtgggcaaggccgagagaaagaaagccacaggttctggtccaaaggatgatgaccagcctgctcgggccgaagccgccgacgtatgagcagaatggctacagatgaactatgattggtactctggagcaatatgttcgcagcttcgattcgttccattgatgccatagtgtgaggtgatttgtatacgtgtggtgtgtgggtctttattgtatcggttgttgcatataagacacga

SEQ ID NO: 1055 - DNA, 786 bp, Triticum aestivum
accgggaagaagaagttgagcggctggctcaagagcgtggaggagaagttcccgagcaaggtgagggccgtggtcaggttcaacgcgcccgctggctcaccagatgatggccggcgccgacgtgctcgccgtcaccagccgcttcgagccctgcggcctcatccagctccaggggatgcgctacggaacgccgtgcgcgtgcgcgtccaccggcgggctcgtcgacacgatcatggagggcaagaccgggttccacatgggccacctcagcgtcgactgcaacgtggtggagccggccgacgtgaagaaggtggtgaccaccctgaagcgcgccgtcaaggtcgtcggcacgccagcctaccatgagatggtcaagaactgcatgatccaggatctctcctggaaggggccagccaagaactgggaggacgtgcttctggaactgggggtcgaggggagcgagccaggggtcatcggcgaggagattgcgccgctcgccatggagaacgtcgccgctccctgaagagaggaaagaggtttttggtgcatggagcattcatccatcttcagggttcccgtgtgaggagatagccgcttgttgtagtgaagggccgatatatacatatttatatatagactaataagtacttatgctttgttgtgccgcttgcctctttattacaaacaaaaaaaaggtaagaagttaggggttgtgcttgtgagagtgtgtacttaatcgtgcttgcattttggtgtggtatattgcaaataaacaaaggatttgtt

SEQ ID NO: 1056 - DNA, 943 bp, Triticum aestivum
  misc_feature (161)..(161): n = any nucleotide
  misc_feature (185)..(185): n = any nucleotide
  misc_feature (261)..(261): n = any nucleotide
acaaagttgagtattgcgcgctgcccgcggttaactttggatggtcttattgccaatctaaagtcatttaatatgaaagcagtgtcgggtattaagtgcctcagaattgacaaaaacttcaatttaccaaaagaggattatgaggagttattatccttgtngagcatcgacaagagacaggagtngcacaaccgggctccgcgattccgtcattctaatcattttttattagattgcaatgacggatatgctcttgatatngagatgtgccccatctgtcaaagttacaaacttgtttttgactggcctgaagcggagtgcagtgacaagagatctggcaagtgcagagcatgtgaggtttgcatcaagagattccggcagtgtggaaggtgcttagaacgaaatgagaagtttgaagagaaatttgatctggtctacctttgctacaagtgtcgaggcgatccggcttcaccatctctcggtgtggaaaaggatctggtctccattttatccagtggaagaataccttctccttgaacatggaggagcaacagtccatgtccagccattcagccatctttcttagcattactgatgaagaaaaaaaaatatagtttgctattcatgaaggtgtgtggtcgtttgacagatggtacatttgcttgcaagaaaaacaaaaaaagatgttactaattccagcagaaataaagggatgattcccactattacagcctcaccagcgacaaggagggatgtttcttcatggaatttgcagttcaagagtgtataggtacatggtgagattggtgtcggtgtgttgcttgatgctgcatcttcctgtgaagaagactgaagacgaacttattccttagcttccaagtatattatatctgtatatgcgtgacattgtaatagtttgtcctggatacgtcgtgtcgtatga

SEQ ID NO: 1057 - DNA, 1155 bp, Triticum aestivum
  misc_feature (709)..(724): n = any nucleotide
cgccatcccgtcgattcgcctgcagcaggcctccgctcccgctcgccgctccccctaggtttcaacccttaagaagctcaagatggccgccaatgttggggaatcagcggcagttggtggcagcagcagcgatgcagctggagggagcttcgagtgcaatatttgctttgagttgccgcaagagccaatagtaactctctgtggccacctattctgctggccgtgcctctacagatggctgcacatgcacgccaacacaccagagtgccctgtgtgcaaggccattgttgaagaagacaagcttgtccccctttatggccgtggcaaggaccgcgtcgacccaaggtcaaagaacacgcctggaggcgacattcctcagcgcccagctggccagaggcctgctacagcccaacaggctgatccgaacaacaattttggcaacgcccatgcaaatccatggttcatgggcatggggggcgcgggggcgggggcgggagttccactggcgaatggacggtggggcaactatgcgttctcggctgcgtttgggggcctgttccctatgcttagcttccaaatgcatgggttcccagatccagctgcatatgctcagcctgccgggtttcactatgggtttggtcacggccatgggttccatggcgggcatatggggcacgcccacggcgtcccccgccaaggaccgctaggnnnnnnnnnnnnnnnngcagatgtctacctgaaggcccttcttatcatggtcggagttcttgtgatcgcaagcctcctcgcagcttaaagttgttactgctatcatcaaaattgtggtggtgtttggtaggagttgccagagcatacctttggtgtaggcttatctctaccaagtgggagacgagttaattctgttcgttcatgtttgtatgaagtgtccatggagtttctgtatctagatttggatggtgatacatcatcctgtgttttgtagttttgactcctttgatttgataaacgtggtgtacaattgttgggaggtcatctccccgtgtctgtaacctgtatcaatctagattggacagtgtagatgagtacatttacatgtaataatcctcatgtttgcacaaagtgacagttcatgtaccttttgacagcaagttcaag

SEQ ID NO: 1058 - DNA, 743 bp, Triticum aestivum
gagttatgataaatgcagacgccagtggagcctcgcggacattgatcacctacgatacaagtacatgaacgcatttgatcaagcaatgaatgcgctcgacgacaaattttccttcctatcatcatcaaagcagattgtcagcgacatgaatgaggaaaagaagattattgtatttgaacgtggagatctggttttcgtcttcaattttcatcccagtaaaacttatgatggttacaaagtcggatgtgacttgcctgggaagtacaaggtagctctggactccgatgctctgatgtttggtggacatggaagagtggcccatgacaacgaccacttcacgtcgcctgaaggagtaccaggagtacctgaaacaaacttcaacaaacggcctaactcattcaaaatcctgtctccatcccgtacttgtgtggcttactatcgcgtcgaggaaaaagcggaaaagcccaagggtgaaggagctgcttcttggggcaaaactgctctcgggtacatcgatgttgaagctactcacgtcaaagacgcagcagatggtgaggcgacttctggttcctaaaaggcgtctccgtgagtgactccagcaagaagggcttacgttggcttccggcaaccgacaaggacaaacatagcccaaataacgctgaacaaaacggtaccgagccctgtaaacaccggatggccaagtacatagtacagggacaaacactgccggatgagagcaccaa

SEQ ID NO: 1059 - DNA, 1521 bp, Triticum aestivum
gagttccgcgggcataggggtccaagaagccgaggacgccagccccaggggcggcggccccatttctccccagggagaagaaagacaagggtcggcgagagagtggcggcgctgcagcagctcgtgtcgccatttgggaagacggacacagcttctgttcttcaggaggcctcgggctacatcaagttcttgcaccagcagctcgaggttcttagctccccgtacatgcgccctcctccggcgcccggcgccgagcctgaggatcccgaccactacagcctgcggaaccgcggcctgtgcctggtgccggtggagcagacgctgcagctgacccagagcaacggggccgacctctgggcgccggcgaacaccaccaggcgctgctgaagcgaagcccgaggctggcctcgacggcggcgatggccgcactgcgtggcaggggtagaattccggtacaagcgcgcgcatggctgacccaattcggtcaatctctaacacaatcgtttcgtttcgtttggtttcgtttctgtgaacatcctcagcagaccctgtgctggcgccggtagtatgtaatgtgtaatcgtcgtgtatagcgagacgacgcaccgccgaccgatcggtcgatcggtccccgtggtcgttgcgtgggtgactgtggttaacatggtagcgtcctgttgctgtcaccggctaatcatcaaaatcagcagttccacccacccaaatgctttcccgtctcctcccacgccgccaccaccgtcgcctccaccaaaccctacaaccggcagccgccgtcgcgggtgaactccaccagaggttgtgcgctactgcggcggcatcgagcccaagcctttcgatatggcggcggaagaaggagatggggcaggaaggcctcatggcggtcgcgcagctcaagcggctcgcggcgctaccccctgccggaggccaccagaggctggtggagtacatgaaattgcatgtgtctcggctcctccgcaccgacctcctcgccgtcctcgctgaactgctccgccaggaccacgtcatcctctccatgaagatatatggcgtcgtgcggaaagagatctggtatcggccggatatgtacttctaccgggacatgctacatatgctagctaggaacaagaaggttgacgagacaaggcaggtctgggcagacctgaagtctgaaggagtgctgtttgatcagcacacttacggtgatatcgtgcgagtcttctgtgacgctggtttgattgacctggcaatggaattctacgaagacatgaggagctccccggagccacctatgtccttgccattccgggttatactgaaaggcctgatcccatatccggagctgagggagaagataaaacaagattttctggaacttttcccagatatgattgtgtatgatcccccagatagcttgtctgatatagatgatgaattcaaattttgacccggtataaatacttgcatactttatgcttgaagctactatcatacatcgaacgg

SEQ ID NO: 1060 - DNA, 503 bp, Triticum aestivum
ctccatcccgacgccacagacccgacgccgccgccggccggcaagaaggcgtcgtccatgggggccccagcagggaccggtcggcgtccaaggcgctcgccaacggcacggcggtggcgcccgagtaggaaggacgtgcaaggtggtgcactacaaggagtgccagcgcaaccacgccgccggcatcggcggctacgccgtggacggctgccgcgagttcatggcgtccgcccccgcgggcgccgaggcgctcctctgcgcggcgtgcggctgccaccgcagcttccacaagcgcgaggtggaggccgtcgagtgcgactgctcctccgacacctccggccggtgatcgccgccgcccgtcgccgcccaagcccgctgttctcttgctggctcgtcacgggtagaccggcatctatcggcaggtaaggcgtggtggacgttgagatgactccattcgatctcgatccatctatcaaatacatatatatggcccggttaattta

SEQ ID NO: 1061 - DNA, 1033 bp, Triticum aestivum
gctatgttttaccggtactatgatcctgtcaactcgtggactggatttccaaggactcttagaagacctcagttcagctccctcaggcgcaattgtactgcttcatgcatgtgcccataatcctactggtgtcgacccaaccttggaacagtgggaacagatcaggcagctgatgagatcaaaagcattgctgccattctttgacagtgcttaccaaggatttgcaagcggaagccttgacaaagatgcccaatcagtgcgcatgtacgtcgctgatggtggtgaattgctcatggctcaaagctatgccaagaacatgggattgtatggagagcgtgttggtgctttaagcatcgtttgtgggagtgctgatatagctgttaaggttgaaagtcaacttaagcttgtaattaggcctatgtattcgaaccctcctcttcatggtgcttctattgtggctaccatacttaaggacagtgctatgttcgacgaatggaccgtggagctgaaggccatggctgataggataattagcatgagggagcagctttttgatgcgctgaaaatcagagaaacacctggagattggtcccacatcattaagcagattgggatgtttactttcactgggctcaacagtgagcaagtagccttcatgaggcaggaatatcacatttacatgacatctgatgggaggatcagcatggccggtttgagctccaggactgtaccccatcttgcagatgccatacatgctgcagttacaaaactgaagtgaatgataacattgcaaccccttcccaataaaatgttaaattgcctacagcagtgtccgaaggttcaaccagaggtgtgttactactggctgaactcaagaatttgccttgtagactcgctaaacttgttgtctgagacagttttgtacacaccggattaaagatgatggtgatttcgaatcccgaataagctgcagttgtgatgctttcgtacccttgaatgctgtggtatttatcctgcagcgctgtataatgca

SEQ ID NO: 1062 - DNA, 594 bp, Triticum aestivum
ggcaagccaagtgaagagaatacatatgcagatattgaagcagtttaccagtgcttagaaaccgagtatggaatcagccaggaagagcttatcctgtatggacaatctgttgggagtgggcccacattgcatttagcatctcgtttaccaagattgcgtggtgtggttcttcacagtgctatactgtcaggcctccgtgttgtttgccatgtgaactttactttttgcttcgacatttacaaaaatgtcaaaaaaataaagaaggtgaaatgcccagtgcttgttattcatgggaccgatgacgatgttgtgaattggtcacatggtaatgagctgtggaaactggcaagggagccgtatgatccactatggatcaaaggaggcggtcattgcaacctggagctgtaccctgacttcatccgccacctcttcaagttcatccgtgaaatggagagtgtgacaacgaaaacgaggctgaagaagattcggcagtcccttgagccgacaaagacagcatatcgagtgaacacagcaacgaacaccaccttcaccggcaactgttgctgccgtattcgagttcgcaaaacgagctgg

SEQ ID NO: 1063 - DNA, 800 bp, Triticum aestivum
accctctcaaaggagtatacagtggaacatcctattgatgcagatttgctgatgggggtgttcgacggtggccccctggagactcggacgatgagcagggtggggtgcctcgactacacggcgaccccgtgggaggagaccaagccgggcgtgctggagcggcacgccagctacaagttcaaccgctacatgtccatcttcggcggcgaggtggtgagcacccagctgaaatcgccctcggaggacggcgacgggtggacggtgtacgacgtcatgacgctgcgcaacgtccccttcggcgactacttccgggtgcatctgaggtacgacgtacggagcgtggcgtcgtcggagccgccgagctgccggtgcgaggtgctggtgggcatcgagtggctcaagagcagcaagttccagaagcggatcgccaggaacatctgcgacaagctggcccacagggccaaggaagtcctcgaggtggccggcaaggagatagcctcggcaatgtcgggctcggctagctaactgagtgggaggatcgggcgtatgggttgaccatcttccggcaaagccgggtggagcgtagcagctaagtcgtcacgttccgtacctacggagacgtgcacgcgcgaacagcaggggctaacacccaaaaccgaggtattagtgcctcaaactatcagagtaaatacaggcggggaacttcgggggcaaccaaacaagtaagaaaaaagacggcgcgacaggaccgacggcggccgagcaggagcgacaaggagcagacaggaagcccagcaaga

SEQ ID NO: 1064 - DNA, 908 bp, Triticum aestivum
aacgagcccatcccagctagctcaaagacctccgttgagccctccatcgaacaagcctcgccgcccctgttgccattcgccgcgactgacgccgaccatgggtttggccatgggcaagctgatgctggggaagatcatcgtggagacgccgaagcacgaggtgctccacaccggcgacggctacgagatccgcaagtacccgccatgcgtcgccgccgaggtgacctacgaccccaaggagatgaagggcgaccgcgacggcgggttccaggtcctcgccaactacatcggcgccttcggcaagccgcagaacaccaagccggaggcgatcgccatgacggcgccggtcatcacctcctccggcggcggcgaggccgagccgatcgccatgacggcgccggtgatcacctcctccgagcccgagccggtggccatgacggtgccggtcctcacggccgagggccgggaggagcaggcgggcaaggtgacgatgcagttcctgctgccgtccaagtacgccaaggcggaggaggccccgcggccgacggacgagcgggtggtgctgcgggaggtgggggagcgcaagtacgcggtggtgacgttcagcggtctggccggagacaaggtggtggccgagaaggcggaggggctcaaggccgcgctgcagaaggacgggcacgccgtcacgggccccttcgtgctctcccgctacaacccgccgtggacgctcccgccgctgcgcaccaacgaggtcatgttccccgtcgagtgatcgatcgtccggccagccggccagattatgtatgcagctactgtgtgctagtatttcattagcttgtagcatttccgtttcgtttaagatggcgcgtcacgtgattgggttcgattgacacaatagatagatgtaa

SEQ ID NO: 1065 - DNA, 1015 bp, Triticum aestivum
cccttctcccccgtcaattttttcggctcgctcgcagggatgcggcggctatggcgatggtaccagcagtccctgtcctcctaccccgtgcggacgcaggtcgtcagctccggcatcctctgggccctcggcgacatcggcgcccaggccgtcacccacaaatccgccagctcccaccaccaccacgccaagaaccccgaggataaagataaagagttcaaaattgattggaagagggtcggcatcacaagttcatttggatttgcttttgttggacctgtgggacattactggtacgaatacttggatcgtatggtccgacgaagatacctgcctggttcgttcaaatttgtagcctcaaaggttgcagcggatggtctcctctttgggccgctagatctggggctgttcttctcttatgtgggccttgcttcaggaaggagtctggagcaggtgaaggatgatgtgaagagggatatcattcctgctctggttttagggggagccatctggccggctgtgcagatcgcaaactttcgcttcattcccgtgcgatatcaactgctgtacgtgaacttgttctgcctgttagacagctgtttcttgtcttggatcgagcacaaggagacgcggcttggaagcaatggttcacatcgttccagaagaaaatcgaagaccagaagagcaacgcttgatctgaatcatgattgaagaagacgcttgaccagaagttagcttccgtcgttttcactgatatatccagggagtatatcacttgctgccagcggctgtttatgtggagttctggtggccagcaatactgggcgtcactgtcatgtggagattgatctttgttttttccacaactttaatgagatgagaaggcaatgctctcgtttagctttttgtttcgtaaccgagcatttgttcatgctgtttgtttaacctgcagagcgcgtatttttaacgagtattcactgtattcctggtgttgtcggaacatgatcttcataaa

SEQ ID NO: 1066 - DNA, 1110 bp, Triticum aestivum
gtgggtggtgaacacgccaactacttcgccgccggcctgaagatggcggaccaggttgtcgtcgtgagcccggggtacctgtgggagctgaagacggtggagggcggctgggggcttcacgacatcatacggcagaacgactggaagacccgcggcatcgtgaacggcatcgacaacatggagtggaaccccgaggtggacgtccacctcaagtcggacggctacaccaacttctccctggggacgctggactccggcaagcggcagtgcaaggaggccctgcagcgggagctgggcctgcaggtccgcggcgacgtgccgctgctcggcttcatcgggcgcctggacgggcagaagggcgtggagatcatcgcggacgcgatgccctggatcgtgagccaggacgtgcagctggtcatgctgggcaccgggcgccacgacctggagggcatgctgcggcacttcgagcgggagcaccacgacaaggtgcgcgggtgggtggggttctccgtgcggctggcgcaccggatcacggccggcgccgacgcgctcctcatgccctcccggttcgagccgtgcggactgaaccagctctacgccatggcctacggcaccgtccccgtcgtgcatgccgtcggcggcctgagggacaccgtgccgccgttcgaccccttcaaccactccgggctcgggtggacgttcgaccgcgcagaggcgcagaagctgatcgaggcgctcgggcactgcctccgcacctaccgggactacaaggagagctggagggggctccaggagcgcggcatgtcgcaggacttcagctgggagcatgccgccaagctctacgaggacgtcctcgtcaaggccaagtaccagtggtgaacgctagctgctagccggtccagccccgcatgcgtgcatgacaggatggaattgcgcattgcgcacgcaggaatgtgccatggagcgccggcatccgcgaagtacagtgacatgaggtgtgtgtggttgagacgctgattccgatctggtccgtagcagagtagagcggaggtagggaagcgctccttgttacaggtatatgggaatgttgttaacttggtattgtaattt

SEQ ID NO: 1067 - DNA, 1214 bp, Triticum aestivum
cggacgctggtcgcgccgccgaccccacccgcggcattctctccggcgtccctcctccggccagggggaaaagcagcagcaggatggtgctgtgggtcacctggtatgggtccctgatctggaaccccggattcgacttcgacgagaagatcctgggattcatcaagggatacaagcgaacgtttaatcttgcttgcattgaccatagaggcacaccacagcatccggccaggacctgcacccttgaatccgaagatggagccatatgctggggaattgcttattgtgtcaaaggtggtctagaaaaagagcgagaagcaatgcagtacttggagagaagagaatgcgagtatgaccagaagatctctgtggatttctacaaggatggaaattctctggaaccagctgtgacggatgtattagttttcgtatccactcctgatccagttggcaacaaatactatcttggccctgctgctttggaggatatggcaaggcaaattgctacagccagtggccctaatggatataatagggactacctgttctcaatggagaaggcactgtccaatataagccatgaagacgactcgatcattgtgcttgcggatgaggtgaggaaggtgctgagcaggtcgacggagaagaaggttaccggctccgacataccattaaaatcgcatacacctgttgtgcacatctctgctcttcctgagggcaccgttgcggtttcaacatagtaagaagagcagcacggctggatcagcgaaagagatggcattttcctctgaccacactcactcttgacattctaccattgaaagatctgtggtttacttcagctctggcaccattgagggtgtgcgctaattttctttggcaactattgtggcaaaggctgtagcttccagagtgctaatgcgaaagcctaagacttcaagtgttattgcttcccttgtgataccctaataataaatgcatttggcgacttcagcacttctgcgccgctgagttgtgatgctttgcttcatgattctgtttcctagttcgttatgaatatcattgactctttttgagcaacagaatggcctctcggtgctccctcgattcatatgataggcaaaggctgtagagtagttctgggagatgaacaaattggttaggaaaacagtgttcgattgagctgaaatattaaaggggtctcgggaactcgt

SEQ ID NO: 1068 - DNA, 1277 bp, Triticum aestivum
ctcaggggtgtcctcccccgcggcctaacgggtccaaagggggcgccccaggggaaaagaagggcgggggagccacgaggtaacaacgggacctggcaaaagaattttgtcgcccgccactataggagttcccacttccctctagaaaaacatattcagtgttttgatattagcttgcttgtgaagcccttggctacaagtggaaagatagccgcaaagtcttcaaaatcgaaatgatgacataattcattggaatcatacccttaagtttctgaagcctattttaacacaagagcaagagcaagaattctacccacacactgaggaacggcaatctcaggcaaagcactctcgggaagagcaacctcaaatggggcagtctcagggaaagcaacctcaaacgggttgtcaggcaaagcacactctgggagagcaacctcaaacgaggcagtctcaggtaaagcactctcagggagaccagcctgaagaaggggagggagggcgatctcaagaagaacaatcgcaggcaaggccatatctgggatgtcaacctcatccatcgcagtcaacttatggtggttggaatggtttggaggagaacttttgtgatcataagctaagtgtgaacatcgacgatcccagtcgtgctgacatatacaacccgcgtgccggtacgataacacatctcaacagccaaacgttccccatccttaacatcgtgcaaatgagtgctacaagagtacatctctaccagaatgccattatttcaccattatggaacattaatgctcatagtgtgatgtacatggtccaaggacatatatgggttcaggttgtcaatgaccatggtcgaaatgtgttcaatggccttctgagcccagggcaactattaatcataccacaaaactatgtcgttctgaagaaggcacaacgtgatggaagcaagtacattgaattcaagactaatgcaaattccatggttagtcacatcgcgggaaagaactcaatcctcggcgccttgcccgttgatgtcatcgccaatgcatacggcatctctaggacagaagctcgaagcctcaaatttagtagggaagaggagctgggggtattcgctcccaaattcagtcaaagtatcttccatagttttcctaagggcggagaagattcatcttcagagggcatgacctaatgtcagaactacctcatggagtaaaataaagacatcactgagcgtgtagaactttgatgtttccatatatggtcatctcaataagata

SEQ ID NO: 1069 - DNA, 761 bp, Triticum aestivum
attgagggaatgagactgaccaggctatctcagaagtcttaagttggtcgaaagatgcaaaagaaattgaaaggttagcagcacgtcaaggaggtaatatatcagaaacttcgaggtactttctaccagctgcgaccaggtgttctcgacttcttgaacgcccttgtggattctgacattccaatagcagtaacagcttctcgcccaagaatgagcctggaagaaggcataaaagctgttggcctgcaaggctattttgatgtcgtagtggcggcggaggacttccgccgagggaaacccgagggtgagatgtttgaggttgcagcagagcagctaggtcttgagcctgatgcctgtcttgtgatgggtagctcaaacttgacgacagagtctgcgcataccgctgggatgaggtgtgtggcggttgcaagccgacaccctgcctatgaacttcaagcagcaaaccatgtcgtgagatggctcgatcagctctctgttgttgacctgcagaggctcgccaatggcgaggttcttgggcgcaggggcagacgatctgacatggacatggagattgtgatcgaggagtgatgtttgtgcaggcactatctactaatactatataactatgttgtaacttcagtactgcattacaacattttgtgacagaccaatagtgtaatactagatcagtgttcacttcttggtttcttgtaatgcataactgaaactcatctagcttagatgtaacaatcattagaaag

SEQ ID NO: 1070 - DNA, 759 bp, Triticum aestivum
tcattattgtcccttcaatctttgaaccctgtggcttaacacaacttgttgccatgcgttatggatcgatccctatagttcggaaaaccggaggactttacgacactgtcttcgacgtagacaatgataaggaccgggctcggtctcttggtcttgaaccaaatgggttcagtttcgacggagccgacagcaatggcgtggattatgccctcaacagagcaatcggcgcttggttcgatgcccgtgattggttccactccctgtgtaagagggtcatggagcaagactggtcgtggaaccggcctgcactggactacattgaattgtaccatgccgctcgaaaattctgacacccaactgaaccaatggcaagaacaagcgcattgtgggatcgactacagtcatacagggctgtgcagatcgtcttgcttcagttagtgccctcttcagttagttccaagcgcactacagtcgtacatagctgaggatcctcttgcctcctccaccaggggaaacaaagcagaaatgcataagtgcattgggaagacttttatgtatattgttaaatttttccttttcttttccttccctgcacctggaaatggttaagcgcatcgccgagataagaaccacagtaacattctgtgagtagctttgtatattctctcatcttgtgaaaactaatgtgcatgttaggctctctgatcatgtggaagctttgttatatgttacttatggttatatggtatacatcaatga

SEQ ID NO: 1071 - DNA, 770 bp, Triticum aestivum
  misc_feature (547)..(576): n = any nucleotide
gcgcgcgggctggcgtacctgtacgaggagctgcccatgctcaccgtgccgcacgggcacctcaagtcctcaaacgtgctcctgaacgccgagctggagccccatccgagcgactacgcgctggtgcccgtggtgacgccgagccacgcgtcgcaggtgatggtggcgtacaaggcgcccgagtgcacggcggcgggggcgggcgagcaagaagagcgacgtgtggacgctgggcatcctggtgctggagctgctgacgggccggttcccgaccaactacctccggaaggggcgggagggcacgacggacctggccggctgggtgcactcggtggtgcgggaggagtggacgggcgaggtgttcgacaaggacatgcgcgacacccgcagcgccgagggcgagatggtgaagctgctcaaggtcgggctcggctgctgcgacaccgacgtcgccgtgcgctgggacatcaaggaggcactggcgcgcatcgaggaggtccgcgagcgcgaccccgcggacgacagcagcaccgcctcgtcctacctnnnnnnnnnnnnnnnnnnnnnnnnnnnnnncgactacccgcactccctctcaacgtaacgtatagcaaacatatgaaattcttgggtcggctggctggttgctccgtgcgtgcatccatgccaggggtatgtaaactcgtcacggcttggtgcgtgcgtgtatgaatcgttagagtttgttgaggaaaatggaggggttgattgtgggatgatgttgtcgtcag

SEQ ID NO: 1072 - DNA, 623 bp, Triticum aestivum
gaagctgctctcctacattgagcagcaggccacggctgctggcgctcgctgccggccaaggccgggctgcagcggtgcggcaagagctgccggctccggtggaccaactacctccggccggacatcaagaggggcaagttcagcctgcaggaggagcagaccatcatccagctccatgcgcttctcggcaacaggtggtcagcgatcgcgacgcacctgcccaagcgtaccgacaacgagatcaagaactactggaacacgcacctcaagaagcggctggccaagatgggcatcgacccggtcacgcacaagccgcgctccgacgtgcccggcggcgcgggcggcgccgccgagggggcggccggcgcgcagcacgccaaggccgcggcgcacctcagccacacggcgcagtgggagagcgcgcggctcgaggccgaggcgcgcctggcgcgggaggccaagctgcgggcgctcgccacgtccgcctcctcctcggcgcagtaccttgtcggcggcccacgccgccgcgcccgggctcgactcgcccacgtccacgctcagctttgcggacagcgcggcgctcgcgttcggtgctggaggcgcccagtgccgggggcgctcta

SEQ ID NO: 1073 - DNA, 628 bp, Triticum aestivum
catccggcgagaatggttgcgtcaaaatcgggcgagctgagggcgctgttcgcgtcactggaccaggatgcggacggcaggatctcggcggcagagctccgggggtgcatgcgggccacgctaggcgaggacgtgccggcggaggaggccgatgcgctggtggcgtcggcggacgcggacggcgacgggctgctgtgcgaggccgagttcctcgagctggcgcagcaggcgtcctgggcgggcgtggaggagggggacgacgagctgaggacccgggcgccgagggaggcgttcgggatgtacgagatggaggggcagggatgcatcacgccgaccagtctgggccggatgcttggcaggcttggcgccgagcggggcgccggcgagtgccgcgccatgatctgccggttcgaccttgacggcgacggcgtgctcagcttcgacgagttcaagatcatgatgagctagcgacctcgcgcctggacccaagcatatgctcctagtttcgtcttgcatatagctcctgcactcgttcgttcgttcgttcgttcattcgttcattcattagattattatttggtactagtacaagttgtaatggtgatgcacagacgtaactgatctatgt

SEQ ID NO: 1074 - DNA, 987 bp, Triticum aestivum
acgggaaagacttgacaaaatatgattttgagccgactgctttagttctccttttgatgatgtgaataaaaggaagcttgcctacaggcatcgtgctattggagacaagtatgcaaagggtttgcaaaaaattctggaccaccgcatgtttaaagtctggagtgatttgtatagttcgacagacaaatatactgatggctggctttcttcagctcataagttgctggaagaagcgctgtgtaaatcaacagctgagcctgctatcaaatcttcaagtatcaattgcatagttacttcagggtcctggttccgagcattgccaaatgtttgctgtatcgcctggacgatgtggtctcatcagataatgtttacagctcgtgggaatcggggaagctgcagtgcttcaagtggatcaaggaacgccacggcggcccgaacgtccgcttctgcgcggttggagacggccccgaggagcgcagcgcagcttccataatgaaatggccgtttgttaagatcgagatccgccccgatgctcctcacaggttccccggcctgagcctgtcgacaatccatggcatcatggacgccgtgtaccagtcatcgggcaaagacggttgacctccggtgtgcgagacggcgtacatgtcttgaggcatcggtcgccgtggacgaggaggccagtctggtgatagttccatggaaccgcatagtggagataccatatatataggaggcatattgccctccctgcctggaggatccggagacgcctgtgagataaataagagcgcccgaccatatagtttgatccgttccggcatgtttgaattgaattctgccagtgttggcccatcttactgtcatctggggaatcatctgctgttgtaagtcgtaaccggttggttggttgttgtcgcaagtctgtatctttgtgctttggcatctcagatttgatggtgtacatgggaaatctggttcagcgaaaag

SEQ ID NO: 1075 - DNA, 1081 bp, Triticum aestivum
caattggagcacactgatgaactcagatgtctggacaaggcggctacaattactgatcttgatgtgaaagaagatagcttcaacaacccatggcgggtgtgcaccgtcacccaggtggaggaactgaagatattggtaaggatgttccctgtctgggcaacaacaattgtgttttcggccgtctatgctcagatgtccaccatgtttgtggaacaagggatggtgcttgatccaacaatcggctcattcaagatccctccagcatctctatccaccttcgacgtggtcagtgtcattatatgggttcctatctatgacagcatcctggtcccaatagccaggaggttcaccggcaaggagaggggcttttcagagctccagcggatgggcatcggcctggtaatctccatcctcgcaatgtcagcagccgcggtcctcgagataaagaggctggccatcgccagggaggcgcacctggtggaccagaacgtcccggttccgctgagcatcctgtggcaaatccctcagtacttcctggtcggcgcctcggaggtgttcaccttcatcggggcgctacgagttcttctacgaccagtcgccggacgccatgcggagcctctgcagtgcgctgcagctcatcaccaccgcgctcgggaactacctcagcgccttcatcctcacgatggtcgcctacttcacgaccaggggagggaggcccgggtggatccctgacaacctcaacgaggggcgccttgattacttcttctggctgctcgcggggctcagctttctcaactttttggtgtacgtgctgtgcgccaacaggttcaagagcaagaaagcggcttgagcttctttgatggtcggagaagttggacggcgtcggagcagcagtcctgtacacgtacacttgaaaatctgtatatatgcttctcagtacatgatccctctgttgacgcacgtgtttattttttttaacaagctgtaattatctctgtatttgaatccaaaatgggtcatgtattttcttttcctgtatatattgtacattcacttgaagtttcaatgtcggccacctcta

SEQ ID NO: 1076 - DNA, 874 bp, Triticum aestivum
tcaagcgtacgagaaaaatggagcagcatgcttaagtgttcttacagattcaaaattctttcagggaagtttcgactacttggaggctatacgcaatgctggagtgaagtgtcctcttctgtgcaaagagttcatcattgacgcttggcagctttactatgcacggtctaagggagcagatgctgttcttctgattgccgccatcttacctgatcgtgatatcagttatatgctgaaaatatgcaaaatactcgggatggcagctctagttgaggtgcatgatgaaagggaaatcgaccgtgttatagggatagctggcattcagcttattggcatcaataaccgtaatcttgaaacttttgaagttgacatttcaaacacgaaaaagcttctggagggtgaacggggacaacttatagcccagaaggacataattgtcgtaggcgaatctggactgttcacgcctgaccatgtttcattcgttcaggatgccggggtcaaagcgattcttgtcggggagtccctcatcaagcaggaggaccctgggaaagcaatcgctgggcttttcggcaaagacatctcacccgtgagtagtgcggtgtaaataggaaaaggggcaaggaatcgtgaaacgctgggcctctcatattttgtataggagaacagagcgatgtgcgcttttggagagttttggtcagcaattttgtttacctggccagtatcagtgttcttcccttgctgccatttcctggaagttgtaaccggcctcactgttcaaaggatgcatgcgaagagagatgatcgaataagttgggtgtagatgttatcagcttgagtttacttagcttgatagatcagctctttgctgttctat

SEQ ID NO: 1077 - DNA, 835 bp, Triticum aestivum
gctgggggcgtttcatccttgcattgttgaagacagttcgaagactatcaagaagcttcttaaccctaatgctccgcttggctatgggttgtgcttcctcacttagcttttgatggctacactaactcaacccaagatttaattaagtccaggttccccaagactaacccttgggatataatgcttggcatgaacctctggggaaccatatacaatactttaattatgtttgtggcgccattactgttcagtaactggccatacgcaaacggttttgaggctgtaagtttttgccgggagaacccagaggtggcctgggacattctcatgttctgcctatgcggcgccgtgggtcagaatttcatcttcctgaccatcagccgattcggctctcttactaacactacaatcaccaccacccgcaagttcatgagcatcgtcatctcatcagttatcagtggtaacccactgtccatggagcaatggggaagtgttgtgatggtcttttctggcctctctctccaaatatatctcaaatggaagagaaagaagggcagagatcacaaggaatgaactcaattcttataagcacattttgatttgtagctttgattgcgcacatttgttgtggagatatccgggagatcattaatgtagcccattgaaatgataggaaagaggtttacatttacaggaatgtttgaaatgtacggtaatcgctaatagtgttagctatttaaaaaccgctgggtagtctattctactcaggggagttgcatcatgagcaatacgataaatcatgtactcaaactttctccatctagctgagcattag

SEQ ID NO: 1078 - DNA, 483 bp, Triticum aestivum
  misc_feature (12)..(12): n = any nucleotide
gctgtgtccctnaagtacatcatgcatgactggaacgacgaggactgcgtgaagatcttgatgcagtgcaagaaggcgatccccgaatcgggcgggaaagtgataatcatggacatagtggtcggatctcctttgaaagccatgctggaagcccaagtctcgtttgatctgctgatgatggtgatcacggcaggaaaggagcgtgacgagcacgagtggcgcaagattttcatggacgcgggattcagccaccacaagacaaggcctgttttggggtttatggccatcactgagctgtatgcttagccatgctgtgcatgcgtggttacagcagatatctgctgtaacgtgtgtgtaagcgttggccctgtgatgttcaccccaaagtatttttctgcagcaacgatttgttcctatgcctttaaaggcgcccacatttgtattatttgttgctcgggtatatggacttaataaaattagcat

SEQ ID NO: 1079 - DNA, 719 bp, Triticum aestivum
cgatgtctacaccttcgcatcgtgttctggactgctcaccgccggcggccccgcatgtttcccggcgaggacgaggacatcgtgaagtgggtgaacgccagctgcagtgcgggcgtcggcggagctgctggagccgggcctgctggagctggacccggagtcgtcggagtgggaggagttcctgctggggatcaaggtgggtctgctgtgcaccgcctccgacccgctggaccggccggcgatgggcgacgtggtgttcatgctcgagggctgccgcgtcggcccggacatcccctcctccgccgacccgaccacccagccgtccccggcgtagtactctccggcgtccctcagccggcattcgtcatgtcagattcagttcagtagcttgtactctaccattttttctgtaattcttttcctagttcagattagcgtttggcgccgcagcctcatgtgcccgccaagcaagtgggtgggggaagtagccgttggggtttctgatctcgtggttaggggggaggtcaggtggccatgtgggtggtgcttggcatgatgctcctcctgtgccatggcattgtcgccgagcttagtgggcgcgcatgtggcccgccgcagcaacggctactgatgcaggatacgggctgtgtctcctctctcctcctatgtactctctgtgtactctgttaggaaattgattcgtgtgggggcctgcttgg

SEQ ID NO: 1080 - DNA, 1154 bp, Triticum aestivum
gccatcaagtcatttttctcgactcctcagaacaacttcaggatttttgtgaatggctccttaggttttggtggcatgggaggtggtgctgataagggtccttgctaatgaaacagagaagtgtcttgaagatctgaggaaggttagtgggctacaactatctgactttattgagctcctgtcagaggcaatatctaaatctggagtattggataaacttttggccactcaaaaactggatgatcatgacatcgaaggggcaattcatctgtattacgacatcatctctcagccttgtttggtctgcaaaaatataactgatgctgagctattgcacaagtactctgtgttgcattctcttcctttggacaagagctgtaagatagtcagggactttcttatttctgctaccgcgaaggactgtagcctcatgatgtgctttcggccacgagagtgtgagagaacagatcctgagtatgattcagtgtttcttcagtcagtgaaccgaacctatgattacaaggcttactttgttgatctggatgtgaagcctctggataagatgacacattattttaaattggaccagaagatcgtcatttctacactaagagcggggaggtcgggcgagtcccttgtgattctcagaagggggttggcaccagtgatgacacaacggttcagccacaacattgagttgctccttcaacttgaagcctctggaccggaaagggcacatgccattggtcctgttgtttcgccttgtccctgttgttgtaaccttgtaagtacagctccattgtcgaggagctcttcccttccatcgggaaaaaaagatgccgcagagcggccactgctgtttgttgtcgctgttactgtagcttatgagtggtacatcatgtatacctaccgccaccaggtggctcgtcgcggcagaaaacacaccaggaattcgatacacagacaccaagatgcatgaacagacttttttacagtggcaaccacatgttgccgtatctgcagcagagatgggagcccaggtttgccttgtaggctacggtgtagccatttcaccggttccctctccacctggtaaccggcgtatgtaccaatgtactccctccgtccggaaacacttgttatcaaatgaataa

SEQ ID NO: 1081 - DNA, 534 bp, Triticum aestivum
ggtgttcctgtccggcgggcagagcgaggagccaggcgacgccagaacctggacgcccatgaaccagctggccgtgctcaaaccgtggacgctcaccttctccttcggccgggcgctgcagcagagtaccatcaagaagtgggccggccagaaggagaacgtcgccgacgcgcaggccaccttcctcgcccggtgcacagggcaactccgaggccacgctcggcaagtacggcggcgcagccgccggcggggacgccgccgcgtccgagagcttgcacgtcgcgggttacaagtactaaggcaccgtcgctcccgcgccattcccgtattcaggatctcggtgcaacccgtgtgtgcgtgcgcacggcgcggcacatggattgcgccaagattcgtgcgtgcgtgcgtgcgtgcagatatatatgctcttccttttctgccgtgtacttaaattctctctcctcccggtttctcctatttaaccagaactactgatgatatataagtggtatatatgaaagtgtgaatgccccc

SEQ ID NO: 1082 - DNA, 718 bp, Triticum aestivum
gggcgctgcggtgtgtcacattacgtcccctggcatcctccactggtggatggatcagactgctgcccacctccaccgtcgtggccggcaccacgccgctccccaataagcgcgacgccgagatccgcgccaagctcaaggccgatggcacattccagcagaagatggaactggcaacacagcagggcatccacgagtcgtactaccgcgacatgatggtgatgttcggcaagtgggagttcgacccgatgagcctgccgaagccgccttgccccgtgcacatctggcagggcgacgaggacggcctggtgcccgtggtgctgcagaggcacatcgtcagccggctcagctgggtgaactaccatgagctccccgcgaccgggcatttcctgtcgccggtccccgggctaggtgacaccgttctccagacccttttcggcaatgctaagcaatgatcagcagcaacaacagcaacagcagctctgaacatactacgttgctgaagtatagcgttcttcgggtgcattgttttattctaaggtggtcaggttatcgctgattagcgacgatgttataggtgaaatggtggtgtaacatcaagtgttttttgtggtggaaatcgcgcagccaggatgtgcgcgcaaaatatgtaattgaaccttggaaacgagaaagtagtggaactactataccatgatgatcttaccttttactccgt

SEQ ID NO: 1083 - DNA, 736 bp, Triticum aestivum
tagcccccgcgctccaggcacccaccccgatcccgggatccccgatcccccccggcgcgatgcgcacagcctgtggcgcgcggtgatgggctcctcctcgtcggcggcggcgacgacccggcggcgggcggcgtggagttctggcacggggcggagcgcgcggggtggctgaccaagcagggcgagtacatcaagacgtggcggcggcgctggttcgtactcaagcagggccggctcttctggttcaaggacgccgccgtcaggcgcggctcggtgccccgggggatcatccccgtctcctcctgcctcaccgtcaagggcgccgaggacgtgctcaaccgccagttcgccttcgagctctccaccccgaccgagaccatgtacttcatcgccgacgccgagaaggagaaggaggagtggatcaactccatcggccgatccatcgtccagcactcccgctccgttaccgacgccgaggtcgttgactacgacagccgcccccagcccccaccgcagcccaagaagagcgaggcgagtgagccgtcagagtaagatcacggtgaactccgtcacccttctctcgatatgactctgttgtatcaacttatgtgattgtgaattcttgtttttgtttcttatttattgactttgtgtatacttctattgagctgatctctatagaatcatacttgagttttacgtgatatagctctctcgaccctttggctcgcttgac

SEQ ID NO: 1084 - DNA, 728 bp, Triticum aestivum
tgcaacggatcattggccttgtatgctgtccagtgttgtgaatgtcataaatggcgtacagtttcaacgaaagatgaatttgagaccacttcgtgagaacttcactgaagacccatggttctgcagtaaaaaacctgagtgctcgtgtgaagaccctccagacattgagtacgacagcagccgcatctgggtcatcgacaagcccaacataccaaagcctccgcccaagaccgagagacttgtgatcatgagaggtgatctgtctaaaatggacatctactatgtcctgccaaacgggaagcgtgcaaggggcatcggggacgtgcagaagttcctcgacacaaacccagagtacaaagaccgcatatcagctgaaagcttcagttttacggtgcccaagattgttgaggagaccgtttcgcagagctctttgtggaagactaaaaaggctaaaaagcaggacaagataaatgcttcaagcagcaagaaggacaaggcaaatgcttcaagcagcgagaactagccatggcagcaaatgcaaaactgtcgcctgttgcttggatgatcctacctcatctaccttgaagttagtcatcaagtcggttctctctctctgcgatgttactctgagcgctccaatgcactgaatctcttcgtttttatgcatgagtttctggtaaaattctgagatgctcgagaagggctgtagctttttctcttctaataaa

SEQ ID NO: 1085 - DNA, 943 bp, Triticum aestivum
caacaacaccggcagggcgctctccgcttaccttgaccgcacccatctcaggagggagctcagcttgcttggcccaatggcctttgcagagaagatggttcttgccgtctttgggggcctgatcgtcctgtggatgacgaggagcctgacggacgacatccctgggtggtcggttctcttccacggcaatgtcggggatggaacagtcaccatcatgatggcgacgctgctcttcataatcccgagcggcaagagcgacggcgagaagctcatggactggggcaagtgccggagactgcagtggcacatcgtcctcctcctcggcgccggcttcgccatcgccgacgggttcaaggcgagcggcctgacggacatcctcgccgggtggctgggcttcctgcggggcgcgccggcgctggccgtcgcgcccgtggcgtgcgtcttcagcggcctcctcacggagttcacctccgacgacgccaccaccacgctggtgctgccgctgctggcggagctgggcaggagcatcggcgtgcacccgctgctgctcatggtgcccggcgccgtcggcgcgcagctctcctacctgctgcccaccgggtcgcccggcaactccgtcggcttcagcaccggctacgtcaccatcaaggacatggtggtcaccggcatgcccgtcaagatcgtcggcgtcgcggctctcaccgtcctgctgccaacgctaggtgttgctgtttttggtatggatcagaaggtataggaaccttaatttttgttgaacatttcatcaatctctagagtgtagactgcaggttggtagtctgtctagcactagaatgttgaggttgtacagtgtatagtcagtggcattaattgcctcatgaacgatatgggatcgtattcttttctgtatctatgagacggtatataaatttgtatcaagcgg

SEQ ID NO: 1086 - DNA, 696 bp, Triticum aestivum
ggccccaccaccgtcaacgcctacttccccgccggccggtggttcagcctctacgactactccctcaccgtcgcaacgaagaccggtcagcacgtcacgctcccggcgccggccgacacggtgaacgtgcacgtggccggcggcaccatcctgccgctgcagcagagcgcgctgacgacgtcgcgcgcgcgccggaccgcgttccacctcctggtcgcgctcgcggaggacggcacggccagcggggaccttttcctggacgacggcgagtcgccggagatgggcggtagaagcgattggagcctggtaaagttcagctgcgcgacggggagcgacggggccatcaaagtgaggtcggaggtggtgcacaactcgtacgcacagagcaggacgctggtgatcagcaaggtggtgctcatgggccaccggtcgcccgcggcgccgaagaagctcaccgtccacgtcaacggcgcggaggtggatgcgagctcgccagccggcacacggtaccagaacgcaggaggactcggcggcgtcgcccacatcggcgggctgtcacaggtcgtcggggaagagttcgagctgaaggtcgccatgtcctattaagatttaggcaatttgtgatttggagcataacattaattgaataaagaagacgagaaattaaagcccagatgaatggcttcacttcgaaaa

SEQ ID NO: 1087 - DNA, 860 bp, Triticum aestivum
  misc_feature (781)..(781): n = any nucleotide
  misc_feature (819)..(819): n = any nucleotide
ttcaatcccctccagctctcgagttcgacagatctcggttcactcaccgccggcggacgcagcgaagcgagggaggagcaatggcggaccgcgggggctacgtgcaggtgcagcacgggcagtacggcgggcagcagcacgggcgccagatgggcgagcagatgaagggcatgctccaggagaaggcgccgtcggcgtcgcaggcgctgacggtggcgacgctgttcccgctgggcgggctgctgtccgggctggcgctggcgggcaccgtggtggggctggccgtggccacgccggtgttcctgctcttcagccccgtgctggtcccggccgcgctcaccatcggcctggccgtcaccgggttcctcacctccggcgcgctggggctgggcggcctctcctcgctcaccgtgctcgccaacacggcgcgccaggcgttccagcgcaccccggactacgtggaggaggcgcgccagcgcatggccgacgctgccgcggcctcggggcacaagacgcagcaggccggccacgccatccagagccgcgcggaggaggcgcgcgccggatgaggaggcggccacaccggcgccaccggcggagcgggcgccggcaccggcaccagggcgtcgtcgtaagccggagccagcaggccgatgtcagtccgccgcgccgcgcagcagggcgcgcgtcgtctagctactacctgctctatgtgtgctagcgccttcgtacgtgtctacacgagcgagtgtgtgtgcgttcgtgcgtgtcagtgtgtgtntgtgatgtttctactgttttagtactgctcgtgttcgnccgatcgatccggtttagtaccgagttgtgaataagaaaag

SEQ ID NO: 1088 - DNA, 741 bp, Triticum aestivum
cgctctccacgctcgtcccgggggtctcctacatccacgcggccccgtgctccgcctccgctccccgccgccgaggcgctcgcccccacccacctcctccactcccgctacgccaccagccgacctcgccgcctacgcgccgcacccggcccacgtcgccgccgtgcaggcgcacgtcgcccccacgcgctcgacgccaccgccgtcgactgggtcaacgccgcgggcgccccgtcccccgtcggccccggcgccgccgtgcgcctcaccctcgccaaggtcaaggagggcgtggaggtcgggcagctcgtggagaaggtggccgccgccaccaaggacgccggcgaggccagcggctccaaggtcagcttcggggagaacttctcccccgcgcgggccaaggggtaccagttcgggatggtggccgtgttcggcagcgtcgaggagctggacgccgtggagggcgacggcaaggtggaggaggccaaggccgccctcaggcccatgctcgacgaggtcatggtgctggacttcgtcgtcgacgctccggcggccgcgagcctctgatggggggattcaggttgatctggatcctagagtgctgtcggtttgggaataatgaactcgtttgcttgtgaaatctgtatcatcttgagatgaataacatcagttgctgtgcctgctgtgtgctcccagtatttacattccgatgcattcagttggtatcttccgtttctaata

SEQ ID NO: 1089 - DNA, 748 bp, Triticum aestivum
ggcgacccggagcccctgagcgccgagccggagctcaagatgatcacgctgaccaaggacgacgagttcctcatcatcgcagcgacggcatctgggactacttctccaaccagaactcggtggactttgcgcggcggaggctccaggaccacaacgacctccggcggtgctgcaaggagatcgtggaggaggcgatccggcggggcgccaccgacaacctgacggcggtcatggtctcgttccaccaggaggcccctccccagatcagggtgaacaggacgggcagggtcgagcggagcatctcggccgaggggctccatagcctcagggtgctcctggaaggccagtgatctcggcggcgcgccattgtcgccgccttcttcttctgcattgttgagtgtcaactctaagtaccgatccgccgtcgtcgtcgacatgccagtttgtggctctattgttacctgggaataaaaccaacgaacctgaagaagatctcacccgccattgtgaatcgtgaggcacctgtaaatataagttgggagcttaattagggtggtaagggagtcagtagcgtgcatccagggggctttgaggctcattatgagatgatgagatgtgttgttccccctgtttaagttttgtctgtaaaagaaaccattctctggttattgctattgtatcagtgtaccttgagttgtctcatgtgatgaaccaccaccttgttgatcactgataagatgagatgtgt

SEQ ID NO: 1090 - DNA, 561 bp, Triticum aestivum
tcctcatcctcgatggcaccttggaagcaggccaaggagatgcacgccgccagcctcccgttcctctcctcgttcgccatccccgtcttccctgcccgttagacagtcggcgtggacggggacagcatgttcgagtcggagctcgtggtgaagaaggagccgcataaggggtgcgtcagcacaatggaggcagtcgcaagggcgctgcggctgcttgagccggagggaagcggtgcggagatcgaggagacgatggtcagggttctcagggcgatggtggccttccagtctgagcatttgcagcaccgtaccatgaagccgagagtgaagatgagaaagaagaaatatatcaagagggacggaggagatgaagaggaatgcctgattgttgtgattgaatttctgcggatttgcgttcctctgttgttcaaaggccatcactgtcaatcacaaggtctgatctccttttttatagcacagaggctggtagtaacttatcttagctttgcattgttggttgttttgaccactgactagatgtaagaaaattgaagtgagttc

SEQ ID NO: 1091 - DNA, 559 bp, Triticum aestivum
catgaccccatggaccgcgccgcgatgcagcggcataagcggatgatcaagaaccgcgagtccgccgcgaggtcacgggagaggaagcaggtgggcggtcgaaactcgttacgtagtactgcttttagttactttttacacgaaaagaagatcaaagctcctcccggtcatgcgaatttgactgggtggtttggcgataaatattttgattcgtccactccaggcctacatagcggagctcgagtcgctggtcacccagctcgaagaggagaacgcccacctgtccaaagaacaggaggaggcaaaccagagacgactgaaagagctcaaggaaaaattgactccagtcattattgcaaaaacgccgtcacaagatcttagaagaacaaactcaatggagtggtagacatgagccaagctcagtagccatccccttacagctatgtagattttgatttgtttgtctgtcattcctctgtttattggagttaactcagttgttgtaacttagtagatatagcataaacagcttaaatggaatcataatgtgtagagcgga

SEQ ID NO: 1092 - DNA, 666 bp, Triticum aestivum
ctggcacagatcagtatggaaactaggtcacacagcatgttttggagaaaggaaaagcgcatgaaaggagccaaatcatcagtaaattgcctaggcaggtcgtgcccatggagccaaaacaaatttgcatccaatgtcatagagaagttgtttccaacatggggatgtagcagagcgggatcttttgatcaagaagattctggaacagactgagggaaataattatttgctggtgatgatgaaggaccagtttgctaattatgtggttcagaagatacttgaaacatgcaatggactacagagggatgctcttgtcagtcgtatgaagggtcacttgcaagcgctgaggaagtacaccttcggcaaacatatcgccagccgaatcgagcagttccctggtgacgacggtgctgcgccgccgggctcccagaagaaagcctgagccgaagactacccggatccttcacggaaagtgtgccggccatcgctggtcgaccctgtcagtggagaatgcgggaaaaaaaaacaaaggaagccgtgcttttcagtggtctgaacataactgactccagatcgtacagatagtcgttgtcgcccgtgtctgggtgtagttatggctaggatgattgagtgatggtgatcgtgtcgtgtggctgctcatagaga

SEQ ID NO: 1093 - DNA, 863 bp, Triticum aestivum
agaaaattgccgagtgctgtagaggatttggagctgatgttataatgacatcagtatcatgccaaaatggatctgagcgctgctgtgaggcacttcaaaagctcaggaaacattacgacattgttgtcaatattcaaggggatgagcctcttatagaaccagagataatagacggtgtggttatggcactgcagcgagctcctgatgcagtcttcagcacagctgccacggcactaaaacctgaagatgcatttgacacaaaccgagtgaagtgtgtagtagacaaccagggttatgcaatatacttctcaagagggctgatcccatttaacaaatcagggaaagtcaatcctcacttcccatatcttcttcatcttgggatttcgggctttgattcgaagtttctgaagatctatccacagcttgcaccaaccccattgcaactagaagaggacctggaacaacttaaagttcttgagaacggctacaagatgaaggttatcaaggtggaccatgatgcccatggcgtggatgcgcccgaagatgtcgagaaaatagaagcattgatgcgggcaaggaacatccagtagtaaacatcacggaaacgtttggtttcgtttcgcatcacgcatggtttcctgttaggttggggttatggtatccacaagtttgtagaaagaaccgggagctatgttcgggttcattccctttacgaaagagtttcttagcgtgtaactggagaacagggtgcatcgtctttgtgtgaattcgggcaatgcacctggtgtgcagttcttgtaattatgtaacattcccatcggtttgtaagattgtactgcttcctgagtaatggatgaatggta

SEQ ID NO: 1094 - DNA, 617 bp, Triticum aestivum
ttttgagtcgcagcttgcggagtcgctattggaaggtgacggacagcttgcattcaagaaactcgcaactgcaacactagaaactttgatgccaagaatcgaaggcaagggtgagtttggacaagcacggtggcggatggtttatgctccacagattccaagtttgttgtccgtagatccaacggttgatccactcaaatcactggcaaacaatatctcttttgctacggaggtcgaagtgcagcttggaaaacgcgttcaggcctctgttgtgaggcaaatgaaagattcagaaatggcgatgcagtggtcgctgatataccagctaaccagtagactccgcgtaatcttccaatccacaccgtccaatcggcttctctttgagtactcggcaacgtcgcaggattgataaattttctgtcattgcacagagctagggctgctgttttagccaaaaggttccgtgtcccgatcaattgtttctgtagataaagcaagtattggcaagctacagttgctgcgtttttgctctttgttggtagctatattctttctctcggaaacaaagtttctgaggttgtacatatgtagcaagttgagctgtctctcttagcgtc

SEQ ID NO: 1095 - DNA, 859 bp, Triticum aestivum
gcgttgagtgacattgacctcgccgtgagggcgtcgatgctggggtggaggttcgtctacgccggcgacgtgcagtgtgcgcaacgagctgcccagcagcttcaaggcgtaccggtaccagcagcaccggtggtcgtgcggcgccggcgaacctgatgcgcaagatgttctgggagatgcgtggcgagccggcaggtgtcggcgtggaagaaggtgcacgtgctctacggcttcttcttcgtgaggaaggtggtggcgcacctcgtcaccttcctcttctactgcgtcgtcatcccggcctacgtgctcgtcggcggccaggacgtgcgcctgcccaagtacgtggccatgtacgtgcccgccatcatcaccctgctcaacgccgtctgcaccccgaggtcctggcacctgctcgtcttctggatcctcttcgagaacgtcatgtccatgcaccgctccaaggccaccatcatcgggctcgtcgaggccagccgcgcaaacgagtgggtcgtcacggagaagctcggctcggtgacctccacccctgccacgacgaccaccatggccaccaacaagggggcaatgaagaagaagaagagccagagcagcatcctggcgcccgagatcgtcatggggctatgcctgctctactgcgccgtctacgacatcttaaaacggccacgatcacttctatgtctacctcctcatgcagtccgccgccgccttcgtcatcggattcggctacgtcggctcccaatgaagtgataccaactaaaacaaattaaaatcccgtacctgccggccgcctctccctagtgaataagctactatcagcttaatttgcattgcatactagctt

SEQ ID NO: 1096 - DNA, 370 bp, Triticum aestivum
tttcactcccccctccctctgctctgctcgacggtcgttgcgccgtttcctgccgccgccatgtccgtccccgtggatagctctagcccgactttgaaaggccgctcttcatcgcctgtccggtcctcctcttctccccacagcgacggcaggacggcggccgagagactcaccgacgacctcctcgtcgagatcctctcgcgcgtgcccgccaagtcgctctgccgcttcaagtgcgtctccaagcactggctcggcctcaccaacgaccgcaactaccgccggaagctcccccagaccctcaccggcttctaccaggggaatcaattggtggattcaggtgttcctttcaccaatgtctcggggagcg

SEQ ID NO: 1097 - DNA, 1021 bp, Triticum aestivum
cttaaatgatgcgctctacttatgagaatgatggatttgtattgagcaccccacgcgtcgcaccactcctcggtctgacagaagccgttgcttgcgtctgagacgaccgcactgacgcgatggaggtgccggtgccgatcaagacggggtcgtggagccctgaggaggacgcgctgctggtggccctcgtccggcagcatggcgcgcggcggtggagcgtgatcagtgccggcgtccccgggcgcacgggcaagtcgtgccggctgcggtggtgcaaccagctcagcccggccgtgcagcaccgtcccttcacggcgcaggaggacgcgctcatcatcgccgcgcagtcgcgctacggcaacaagtgggccgacatcgcgcgcctcctccccggccgcaccgacaactccgtcaagaaccactggaactccaacctccgcaggtgccagcgccgcgccaaggccatggccgccgccgccgccgcgcgtgccgccgcctcctcttcctcgtcgtccggatcggccgcgagagccaagacgcaacagcaggaacaggtcgtggtgatgaacgggacgccgccggccgccgtgcatggagcgggtactgctgccgtcgatgacccgcttccaatgccgtcgctgacgctgagcctgggcctgccccagatggccgcggactgggcgtcggaggaggcaaaggcaaaggaaaaggaaaagacaccaccgccggtgggcgtgggggacggtgaagtgcggctgatggcggcgatgcggcagctggtgagggaggaggtggagaggcaggcagggcagctcttgtactcggtcatcatggccaccaccgctgccagggccgacgggacatcgccgtccgatggcccaaccaacggccaccactaaggtgggtagtaaatcatatatggatggttttcagtgtaatctctgtcatttaagtttgtgttgtttcaagacattcccctgttgaatcatgtaatatcttccgtgtttgctattggcaagtt

SEQ ID NO: 1098 - DNA, 1013 bp, Triticum aestivum
cctcacctcactccctcggtctctctcggccgtcgctgccaccgcctcgacccgtcactctctgccccccgatggcgacggcgacggcgatgtgcgcgacggccgccacgtacggggcaccgatcccggcgccggcacccgccgcattctctcctcaccgcgcggcccggcgggcggcgggcgcgggcggtgacggcgaggccgcggcccctgttctcgccccgggccgtctcggactcgcgcaattcccagacgtgcctcgatccggacgccagcacgagtgttcttgggatcatcctcggtggtggcgccgggacaaggctgtacccactgaccaagaagagggccaagcctgcggtgccgttgggtgccaactacaggctcatagatatcccggtcagcaactgcctcaacagcaatgtgtccaagatctatgttctcacgcagttcaactccgcgtcgctcaaccgccacctctcgagggcctacgggaacacattggtggatacaagaatgatggctttgtcgaagttctcgctgcgcagcagagcccggagaatcctgactggtttcagggtaccgcagatgccgtacgacagtacttatggctgtttgaggaacacaatgttatggagttccttattctggctggagatcacctgtaccgtatggactaccaaaaattcattcaagcacacagagaaacagatgctgatattactgtggctgccctgccaatggacgaggagcgcgcaactgcatttggcctgatgaaaattgacgatgaagggagaattgttgagttttcagaaaaaccaaaaggagagaagttgaaggcaatgatggttgacaccaccatactgggccttgattctgagagggccaaggaattaccttatattgctagcatgggaatctatgtttttagcaaagatgcgatgcttcggcttcttcgtgacaattttccttcagcaaatgactttggaagtgaggttattcctggtgcacagaaa

SEQ ID NO: 1099 - DNA, 764 bp, Triticum aestivum
tggtcacggtgcctgatcgacggatcgcgcttctggatccactggtcggcttcttcttcatgcggtgttcatctggggctcgccttcccgtaccaccactggacgacccgtggaaccacatcgggttcgtggtgctgtacgggctcaccttcttcttcgccacttcgggcccaactccaccaccttcatcgttcccgccgagatcttcccggcgaggctccggtcgacgtgccacggcatctcggcggcggccgggaagctgggcgccatcgtggggtcgttcgggttcctgtacctggcgcagaaccaggacccggccaaggtggaccacgggtacaaggccggcatcggggtgaggaactcgctcttcatcctcgccgcctgcaacttcctcggcatgggcttcaccttctgcgcgcccgagtccaacggcctctcgctcgaggagctctcccgcgagaacgaggaggaggcgccggacgccaggacggtgcccgtgtgagaaacacgtcgtcagatagtagtatattctgcgagcaggtttcgatggatgtatggatgttttttatggtcggagagcgttcaactcaggagtcgagtcgagtcgagtacaagaataatctatctaatcttgtgatgggtcgagttgtccaggttaattagggctgctgctcgagttattagcagtgatataggtacggtgtaataccaagtcagagaagtgcatcgaagaggcaagcttatatgtacgtgacgtgtgattg

SEQ ID NO: 1100 - DNA, 819 bp, Triticum aestivum
  misc_feature (52)..(86): n = any nucleotide
cctccttccacacgttccttccttcgcatggctgaccaccacagagacaggnnnnnnnnnnnnnnnnnnnnnnnnnnnnnnnnnnncagtggccacggaggctacggcagcgaccaccacgagcagcaccagcagaagcagccggcgatgatgtgcgcgctgaaggccgcgacggcggccacggccgccgggtcgcctgctggtgctgtccgggctgatcctggcgggcaccgtcatcgcgctcaccgtggccacacccgtgctggtcatcttcagcccggtgctggtgccggcggccatcgcgctggcgctcatgtccgccgggttcgtgacgtccggcgggctgggcgtggcggcgctgtccgtgttctcgtggatgtacaagtacctcaccggcaagcacccgccgggcgccgaccagctggaccacgccaaggcgcggctcgcgtccaaggcccgcgacatcaaggacgccgcgcagacccgcatcgaccaggcgcagggggcttgaagaggaggtccgtgccccgacgcgcggccggtgcgtggatgatgatgaacgatatagcgtacggttgctgatccgtgcgcgcgtttgatcgccgccgcgcccgccgcgcgagcaagtcgacgacgtttaccacctgtttgtgctatccgaccgagtgcgtgtttagacttttgttgcgaactagttgtcctagtagtactctagcagtatgtttccgtggtcgaagtcgggagagggtctggatgctggatgtactatggtgtgttcttgtggatgtctgcccgtttatgatgaataaattgccaagt

SEQ ID NO: 1101 - DNA, 486 bp, Triticum aestivum
acgagttcgcatgccatttcagcccatatatccacgatcgtaagcccccactgcgcagaatcgatgtgggtctacctcaacgcccatggaagctatccagctggcctgttttccaacgagtgcccagtgcttgactgcaacggtaaccatagcccccttagtactatacccaactgctaatggaaacggcacccgaggggctaaaggaatatcagagatgtactcacttgtgacgaccttaattgtatctggactcccggtgttattgttctactgaatgaagtactctctccgtttcacaatgtaagtcattctagcatttcccacattcatattgatgctaatgaatctagatagatatagaatgacttacattgtaaaaccggaggaagtaagaaaagatacactatcacacagaatggacatgttaccgttgtggtaataagttgcgtttcagcataaatatacattacgagataagagtaa

SEQ ID NO: 1102 - DNA, 1030 bp, Triticum aestivum
caagatcccgctgatccgggccgccatggtggcgcacccggaggcggagtgggtctggtgggtggactcggacgccgtgctcaccgacatggacttccgcctcccgctgcgccggtaccggggccacaacttcgtcgtcaacggctggccgagcctcgtgtacgacgaggcgagcccgtcgtggacgggcctcaacgccggcgtgttcctcgtgcgcaactgccagtggtcgctcgacttcatggacgcctgggccgccatggggcccgactcgccggactaccgccggtggggcgccgtgctcacgtccacgttcagggacaaggtgttcaacgagtcggacgaccagtcggcgctggtgtacatgctgcagcacaagggcagcccgtggcggggcaaggtgttcctggagaacgactactacttccagggctactgggtggagatcgtggggcggctcggcgacatcgcggcgcggtacgaggccatggagcggcgggcgccggcggcggcgctgctgcggaggcggcacgcggcgagctgggaccacgcggcgcacgcggcggcgagggaggcggcgctggcgggcgcggggctcgcggagagcggcgtgcgcgggtggaggcggccgttcgtgacgcacttcacggggtgccagccctgcagcggcgaccggaaccgggactactccggggacagctgcggcgacggaatgcggcgcgcgctcaacttcgccgacgaccaggtgctgaggggctacgggttccggcacgccggcccgctcagcgacgacgtgcggccgctgccgttcgattaccccgcggcggccgggaggcgctgacaaccgaacgggcggggcggcggcgagtcggttgagttttgtctttgtgctgctgtgcgtggctgctcgctgtcgctggtgggtttagcaacgaaagtcatgtacttcagccgtggggttgagtacatttgatgtctgccgttatccattttcttgtaccaataaaaagttgcacagtaactgtcaaaa

SEQ ID NO: 1103 - DNA, 741 bp, Triticum aestivum
gaggctgtagatgctgaagcacttaagatggaatcattcccaaccctaaggaagttgatggcgtgaaagtcctgcagctagaaaccgcagctggagcagcgatcaggttctttgagaaggcaatcggcatcaacgttcctcgctcaaggtttctgcccgtgaaggctacatctgatttgttgcttgtgcagtctgatctctataccttggtcgatggctacgtcatccgcaacccagccagagtgaagccatcgaacccttcaattgagcttggtcctgagttcaaaaaggttgccaacttccttgcccgtttcaagtcgatccccagcattgttgagctcgacagcttgaaggtctctggcgatgtctcgtttggctctggagtcgtgctcaagggcaacgtgaccatcgcagccaaggctggagtcaagttggagatcccagacggagctgtgctcgagaacaaggacatcaacggccccgaggatctttgagtgacgcctgctgcatcgccagtcgcgttcccagaaaccttcctgtcctctttcgctgagttaacagtcatgtaattttcgtgtgcattctgctggggtgttgtcctgggatagcccctttacataataattgtaatcccctctgtgctgttcatctacacttgttcttcctgggcgtgccagggacgtaaaatttcttttggttatatgatgcccatagttttcacatgcctacatgtgacactca

SEQ ID NO: 1104 - DNA, 279 bp, Triticum aestivum
ccaggagacaagaaaacttcagaatggaggacatggagcagtaccaactctttgatagtggcatggttgttgaactccttgtctccaaccattgctgcaactgttgagactatctcaactgctactgaggtatggaaaaccctctcaaaactgtactcaggtgaagggaatgtgatgttaatagctgaaacagaggagagagttggtgaactcatacaaggggaaaattctatgatggagtatgttgctgaactgcagcatttgtgggctgatttagat

SEQ ID NO: 1105 - DNA, 421 bp, Triticum aestivum
  misc_feature (142)..(142): n = any nucleotide
ctcaaggatgatcttccattgagaggtagaacttgactgaatcaaacatagttgatgttctgtatcaccggggagactactaatgtttcattcgggacagcaatctccagtaagaaagacgattcagagtatttaatgctanagcaattgggacacatacttggtttaacccgcaaagaagctcaagatgtccacattaagctggcagaaaaagcatttgtgcaacaggctgaagtggttctagctgatgggaagttgacagaatccaaggctgaccagcttgcaacgatacaaacgcaggttggtttgccatctgagcatgcacagaaaatcattaagagcatcacaacgacaaagttgtctagtgcaattgaagcatctatatcgcgaggacagattggtatacagcaggtccgaggat

SEQ ID NO: 1106 - DNA, 567 bp, Zea mays
atgacctccaggcgcccttcacgggagcgggatgctgacggcgtcgtcgccgacgttaccgccgcacgcgtgaaacgacatgatgacctgcagcttgagcccctcgccctgcacgacccggaacaggtcccggtacgcgcgccactcgtacagcgccggcccggcgccctccacggcgccccaccacacgtccaccatcacgccgtcgacgccggccccccgcagccgccgcagctgctcccgcagcttccccgcgtcctccaggtcgttctcggtggtcaccacttcaagtgggagcatgacgaagaccgggacgtagttgccgagccggagcaccgtctcctcgtcgctggacagtggcgggggctgtggcacgggagacctttctgcgggctcggtggccacaggaccaagcgcggcggaggcaaccgtcctcgtcctcctcctggtatcgacggcgacaagccgtccggcggccggtggcggaagaagcgccggcgtcgatgccacgctgaccccgcatgtaccccattgttgcggcttcacctgagacgacggcgaggccgt

SEQ ID NO: 1107 - DNA, 375 bp, Zea mays
  misc_feature (45)..(45): n = any nucleotide
  misc_feature (51)..(51): n = any nucleotide
atgctgctcaacgcgcggcccaaccggcgtggtcttctcccggcnccggcnccggccccgggcgcgcgcagggtcgcggcggtgacgttcctccggctctcggacgagctcctggcgagcaacaacttccggatcttccggaccttcgtccggaaaatgcacgccgacctggattactgccctgatgcggaccggtacggtcggcccctcaagcccctagagcggtccgcgccagagatgcccatggagcggctgctggaagccaccgcgccggcgccggcgttcccgtttgatccggagaccgacatgagcgtcggcggcgggctcgcagaggctgtcgactgggtgctcgacaagatcgcgtggctatttgga

SEQ ID NO: 1108 - DNA, 537 bp, Zea mays
atggctgatggtgaggacatccagcctcttgtctgcgacaatggcaccggaatggtcaaggctggttttgctggggacgatgcaccaagggcggttttccctagcattgttggccgtcctcgccacactggtgtcatggtagggatgggacagaaggatgcatatgttggcgatgaggcacagtccaagagaggtattctcacgctcaagtacccgattgagcacggtattgtgagcaactgggatgacatggagaaaatctggcatcatactttctacaacgagcttcgtgttgcaccagaggagcaccctgtgttgctcactgaggctcctttgaacccaaaggccaacagggagaagatgacccaaattatgtttgagactttcaatgttcctgccatgtatgttgcaatccaagcagttctatcactctatgctagtgggcgtactactggcattgttcttgactctggtgatggcgtgagccacactgtgcccaattacgaaggattgcccttcctcaatgccattctcgtt

SEQ ID NO: 1109 - DNA, 552 bp, Zea mays
atggcggcggagcaggggcggtcgctggcggagacgcccacctggtccgtggcaaccgtcaccacgctcatggtcgctgcctgcttcctcgtcgagcgctccctctcgcgcttcgccaagtggctgcgcaagaccaagcggaaggccatgctcgccgcgctcgagaagatccgcgaagagctgatgctgctcggagtcatctcgctgctgctcagccagacggcgcgcttcatatcggagatctgcgtgccgtcctcgctcttcaccagccgcttctacatctgctccgagagcgactaccaggacctgctgcgcaacacggacgccaaccagacggcgctcgacaagaacatgttcggtggccaacggctgcacgtctgtggcgagggccatgaaccttttgtttcgtacgagggccttgagcagctgcaccggtttctcttcatccttggtatcactcatgtgttgtacagttttgtaacagtggttctgtccatgatcaagatctatagctgggaggaagtgggaaaccttagcaggtccaattgctgc

SEQ ID NO: 1110 - DNA, 588 bp, Zea mays
  misc_feature (522)..(522): n = any nucleotide
  misc_feature (526)..(526): n = any nucleotide
atgggcacaaatgtacacataaggaaggtatcgccagtggtggatgctcagggaacggaggcgaaggtcggcagcagccagccgcgctctgttgccagctccacatactctccaaacttctcctgggcatttgggatgtcgaggatcagatcatcaaggccttccttgacacgggcaaagcctttggtcatctggttgatggttatgagcccctcgccgaaacactcctgcagcaggaccaagatgctggtgtcattctgcttctccatcgccatgaccagtgccttctttaccacctcatggttgaagaagggcatcccaagatcacggatgcatctgcaggcttctcctaggtcaccaccagtgttgtattcctccaatagcttagtgatcttgtccttagtatcttccacagcccatccagtgccaccgccccagcaccgcagtatccgctcaccagaatggcgagctgacagtagagcacgcgccatctggacagtttggctggcactgctgttcggncgangctttatgctgatttcatccaaatttgagcgggatttatacttcatcaatcactgccctagc

SEQ ID NO: 1111 - DNA, 411 bp, Zea mays
atgggcaacgtcacgtcgtcggtggcggcgcggctggccttcttcccgccggagccggccacgtacggcgtcgagcccgcggccgagaacggcgccctgctgcggatgacgggggtgttgccggacgcgggcgtcgaggtgcgcgcgctgcccaccagggccggcacgcgcgtcgtctccgccttctggcgccaccccgcggcgcggctcacgctgctctactcccacggcaacgccgccgacctcggccagatgctcggcctcttcctcgagttccgcgcgcacctccgcgtcaacatcatgagctatgattattcaggctacggtgcttctacaggaaaaccatcagagtacaacacctacaatgacatagaggctgtttatgattgcttgagaacggtgtatgtcata

SEQ ID NO: 1112 - DNA, 696 bp, Zea mays
  misc_feature (348)..(348): n = any nucleotide
  misc_feature (413)..(413): n = any nucleotide
atgcaggttcctggaccacgcggccatcgtcgtcgtcgacggcggcggcgagtcgtcaccggcggcgagcaagtgggcgctgtgcacgcggacggacgtggaggaggtgaagcaggtggtgcggatgctgcccatctgggccaccaccatcatgttctggaccatccacgcgcagatgaccaccttctcggtggcgcaggccgaggtcatggaccgggccctcggcggcggctcgggcttcctcatccccgcgggctccctcaccgtcttcctcatcggctccatcctgctcaccgtgcccgtctacgaccgcctcctggcgcccctcgcccgccgcctcacgggcancccgcacgggctcaccccgctgcagcgcgtcttcgtcgggctcctcctctccgtcgcccggatgncgttgggcgcgcctcgtcgagcgccacgtccagtgggcgtcggctaggggccaggctaagttggttcgtgtcatgcggagctggtgctcggcgggcgcggccggggtgcgaggtgcggcggctggtcgcgtgtgtggggtgggtggggcgccgggagcggggccgggtactggctggtggtgggggggtgggggggtcggtgctgtcgcgtgtgcgggtgcgccggggcgtcgtccaagtcagtgtgagcgtcgtgggtcgtgtttgggaggtgcgggttgct

SEQ ID NO: 1113 - DNA, 375 bp, Zea mays
  misc_feature (75)..(75): n = any nucleotide
atggagatgactattaaatacatagatccaacttacatgatccgtgctattccaagcaatgcatcagacaatgtntattgcaccctgctcgcacatagtgccattcatggtgcaatggcgggatacagctttacagtcggaatggttaatggcaggcatgcatatataccatttcatagggtaacatctacaaggaacaaggtgaggataactgacaggatgtgggcgaggctgctgtcttcaaccaaccaaccgagtttcctgagccagaaggacatcgacgcggccagagaagccgacaaggcggccaaccgcatgaagagcagagaggacgcgaagaagcaatctacaccagtgttggcaaatggtgagaaa

SEQ ID NO: 1114 - DNA, 165 bp, Zea mays
  misc_feature (80)..(81): n = any nucleotide
atgggtgtcgggtttgcaagagggctcaatagagtcagggcagagacagttcgcgaaattgtggcgtcctggtgttggtnncacaattccagttggtgctgtcctatctatcttctacacattgatcttaaccaaaattctggcgtacttcatgtgagtggattg

SEQ ID NO: 1115 - DNA, 435 bp, Zea mays
  misc_feature (377)..(377): n = any nucleotide
atgtcgcccgcctcttccatgctcaccgccgtgtcgctctcctccccgctcccagccccgcgcctccgcgccgccgccgccgcctcctccttcgctccgccgcgccgcgcggcagtcgcactcgtcgtgcgcgcggcgtccgcatcttccaagtcccctgccacggcggaggcggccccgaagaagaagagggcgaccggcatcacccagccgaagtccgtgtcgccggcgctgcaggcaatcgtgggcgacccggttattccccgcaccgaggtcctcaagcgcctctgggcctatatcaaggagcataacctccaggatccctctgataaaaaggtggtggtttgtgatgagaagctgaaggtcctgttcgcggngcgggagcgagtgggattccttgagatcgccaagcttctcaaccctcacttcgtgaag

SEQ ID NO: 1116 - DNA, 375 bp, Zea mays
  misc_feature (117)..(117): n = any nucleotide
atggcgcaggtctcgcacgccatcaaggcgcttcagctcctcgcgctcgcctccgtctcttcattctcctggcccccgcctctgtactgccccatcctcctcgccgtcggccagtanctcaacttcagggtgtatcagctgcttggtgagccaggtacctactacggcgttcgattcggaaagacgatcccgtgggtgacagagtttccctttggttacatcaaagacccacagtatgttgggagcatgcttagcctcgtggcgctcctgtgctgggttccgcttcagtacgtgttgctgtggtgccttggctatgttttcatgatgtgggtcgaacacaaggaagactcagccagtcgtgccaaggtcatctcc

SEQ ID NO: 1117 - DNA, 366 bp, Zea mays
atggcgcccgagttgctctccttcttctcgaccatcacggcgttcaacctcatcctgatctactccatcgagctgttcccgacgtccgtgcgcaactctgcggtggggctggtgcggcaggcgctggtgctgggcggcgtggtggcacctgtgctcgtcgcgctcggccgcgaacggagcttctggtccttcggcgtgttcgggctctgcatcggatgtttggggctctttgccgcctgcctccccgagacgagggggcggagcatgtcggacaccatggaggaggaggagcacaaggaggccgccgccgcggcttgcaccggcgcaaccgacattgccacgaaggatgataccgacctgctcgtg

SEQ ID NO: 1118 - DNA, 291 bp, Zea mays
atggttggcacgcggcccccagccggccccctgccaccgcccctcgcaacccccacctcgcgcccgcagcggcgcgacccacggccgcccacatcaagcccgcccccgcccccatcccccccaccaaagccacatcccaacgtgatggtacccatccctgttagaaaatccgacggcgacctcaccgacgtcggcagcctcgtctcctacctgcagggcccgctcacgcgcctgctcggcggcatcttccacctcttccccgccggcttctccttccacgtccgacgagcc

SEQ ID NO: 1119 - DNA, 618 bp, Zea mays
atggggcggccgccctgctgcgagaaggcgcacaccaacaggggcgcgtggaccaaggaggaggacgagcgcctggtggcctacatccgcgcgcacggcgaagggtgctggcggacgctgcccaaggcggcgggcctgctgcggtgcggcaagagctgccggctgcggtggatcaactacctccggcccgacctgaagcgcggcaacttcaccgccgacgaggacgacctcatcgtcaagctgcacagcctcctcgggaacaagtggccgctcatcgccgcgcggctcccggggcggacggacaacgagatcaagaactactggaacacgcacgtccggcggaagctgctgggcaggggcatcgaccccgtcacgcaccgccccatcgccgccgacgccgtgaccgtgaccaccgtctcgttccagcccagccccagcgacgccgccgcagcagcagcagaaaccgaggtgacggccgccaaaggcgccagatgccccgacctcaaccccgacctctgcatcatcccgccgtgcccgcagaaggaggaggaggaggcggtggacctccaaccctccgccgccgtcgtcaaccggtaccgtctggcgggtacgcccctc

SEQ ID NO: 1120 - DNA, 570 bp, Zea mays
atggtcggcaggggcagcctgggcaccgtgtaccgcgcggtgctgagcgacggccgcatggtcgccgtgaagcggctgcgcgacgccaacccctgcgcgcgcgacgagttccaccgctacatggacctcatcggccgcctccgccacccgcacctcgtcccgctcagggccttctactacgccaggcaggagaagctcctcatctacgactacctccccaatggcaacctccacgatcgcctccacggtcacaagatgtcgggagagtcggcgctggactggacgacgagggtgcggctgctgctgggcgcggcgcgcgggcttgcgtgcatccaccgggagtaccgcacgtccggcgtgccccacggcaacgtcaagtccaccaacgtcctgctcacaaggacggcgcgggcgcgcgtggcggacttcggccctcgcgctcctgctcagcccgggcgcacgccatcgcgcggctggggggtaccacgggcgcccgagcagcaggacgacaaggcgctggtcgcagaggccgacgtgtacagctttcgcgtgctggtccctggaaggcgc

SEQ ID NO: 1121 - DNA, 720 bp, Zea mays
atggcgagctctcagtgctgcgataacccgccggccctgaacccggcctgcggggagggcaaggtcgtcgacagcttcggcgggctcaaggcctacgtcgccggccccgaggactccaaggccgccgtcgtcctcgtcgccgacgtcttcggattcgaagcgccgattatgaggaagatagccgacaaggttgcttcgtcagggtactttgttgtggtaccagatttgtttcatggggatccttatgcacctgagaatgttgagaagccctttcctgtgtggataaagtcacatactccggaaaaagggtttgaagagacaaaacaagttattggggctctaaaggagaagggagtgtctgctgttggagctgcagggtattgctggggtgcaaaggttgttgtggagttggcaaaagctcatgagatccaggctgctgtgctgttgcacccttcttttgttaccgttgacgatatcaaagaggtcaagtgcgcaatttctatcctcggagctgagattgacaaaatgtccccaccggagctaatcaagcagttcgagcaggtcctttctttgaactcaggggttggccacttcgtcaagatcttccctggtgtggcgcatggatggagcgtgagatacaaccacgacgacgcagctgccgtgaagagtgctgaggaagcctttgcggacatgctcgactggttcaacaagaatctgaaa

SEQ ID NO: 1122 - DNA, 429 bp, Zea mays
  misc_feature (292)..(292): n = any nucleotide
atgattggggtgcgcattgtcagttataagtctctgatcatggtgctactgctggtgctcctcgtctgcgttgtctcgccggcgacggccgcggccggccgggcggaggaggcgcacctggtgcccgcgttgtacgtgttcggcgactccaccgtggacgtgggcaacaaccagtacctgccggggaactccgcgccgcagctcccctacggcatcgatttcccgcactctcggcccaccgggcgcttcagcaacggctacaacgtcgccgacttcgtcgcgaaactgttgngtttcaagaggagcccgccggcttacctgtcccttgacgccaagaacgagccgtcagatcttgagaagcctccgcggcgtcaaactacgcgtccggaaggtccggcatcctcgacacccacgggaacacgatcacgt

SEQ ID NO: 1123 - DNA, 828 bp, Zea mays
atgatgacatttaaggtcatgactactttcatggcacctccacctgctgcaactttccttgcattccacccacaagataataatatcatcgccattggaatggaggactctaccatccaaatctacaatgtccgcattgatgatgtcaaaagtaagctcaagggacatcagaagaagattacggggctggccttttctcaatcaatgaatgtgctagtatcatcaggtgctgatgctcagctatgtgtgtggagtattgatggctgggaaaaaaagaaatcaagatatatccaacccccagcaaaccgacctggcactttggttggtgacacaagggtgcagtttcacaatgaccaaacacatcttttggtcgtccatgagagccagttgggaatctatgatgggaatcttgactgtttgcgcttgtggtctccaagagatgcactcccagctccgatatcgagtgcgatatactcgtgcgacggtctcttggtttacgctgggttctgcgatggtgctatcggagtcttcgaagcagaatctcttaggctgcgctgccggattgctccttccgcttacattccaccttcaatactagcctgtgctggacgggtctacccgttggtagtcgctgcgcaccccatggagcctaaccagatcgcgatcggcatgagcgacggcaaggtccatgtggtggagccattagacggggacccgaagtggggatcggcacctccacaggacaatggagcgcacccgcacccgcatccagcgatatcagcggcaccgtcgaccgccaccaaccaggcatctgatcagccaacaagg

SEQ ID NO: 1124 - DNA, 336 bp, Zea mays
atggatagagaaaatggtctgttcaaaccagacccacgttttgaagaagccaagcagtttataaggagtggcgcttttggcagctatgactatgaacctctcttggattcccttgaagggaattctggatttgggcgtggtgattatttccttgttggctatgacttcccaagctacatcgatgcacaggatcgggtggatgcagcctacaaggataagaagaagtggaccaagatgtccatcttgaacacagctgggagtggcaaattcagtagcgatcgcaccatcgcccagtatgccaaggagatatgggacatcaaggctagccctgtcgtg

SEQ ID NO: 1125 - DNA, 165 bp, Zea mays
atgtccacagtggttcctgcatgtacttcgagcggctcagtatacacaatatgtttttgtgaaagcagaaacgctctcatagtcttttccttcatctcagccttcatttttgcagatctctcagcctttattctttcagcgccctccctttctcttctctcttgt

SEQ ID NO: 1126 - DNA, 372 bp, Zea mays
atgccccccaggcatccccctgccaccatccaaacgccggagcgccctcgtaccggggcggcggcgccgttcggaggtgccgcggacgcacccaccggcacctccgagggccctgccagcgccagcgggccatcagctggtgacgcgccggcgtatggcgccagcgccagcggcccgactgctgatgctccggcggcggcggcggcggcggcgtcgtccgggccctctagcgcacccgcgccatcgtcgtctgagtcctccggcgcaccagggccgtcgtcgtctgatgggtcctccggcgccccggcgccatcgtcgtctgatgggtcctccagcgccccggcgccatcgtccggcgacgacggatcagct

SEQ ID NO: 1127 - DNA, 660 bp, Zea mays
atggatcgggttcgtggatccgcgttcctgctcggcgtcctgctcgcaggatccctgttcgcgttttcagttgctaaggaggagaccaagaagctcggcaccgtgatcggtatcgatctcggaaccacctactcctgtgtgggtgtgtacaagaacggacatgtcgagatcatcgccaatgaccagggtaaccgtatcacaccctcatgggttgccttcaccgatagcgagaggctcatcggtgaggctgccaagaaccaggcagctgtcaaccctgagaggaccatctttgacgtcaagcgtctcatcggaagaaagtttcaggataaggaagtccagagggacatgaaacttgtcccctacaagattattaacaaggatggcaagccatacattcaggtcaagatcaaggatggggagaacaaggtcttcagccctgaggagatcagtgccatgattcttggcaagatgaaggatactgctgaggcgtcccttggcaagaagatcaacgatgctgtcgtcactgtccctgcatacttcaatgatgcgcagaggcaggcaaccaaagatgcctgtgtcattggccgcctcaatgttggtaagatcactaatgacccaactgctgctgcttttgcctcatgtctgggacaaaaagggtgc

SEQ ID NO: 1128 - DNA, 606 bp, Zea mays
  misc_feature (499)..(499): n = any nucleotide
atggccggcggtggcatcgtgaacacgggcggtggcaaggactaccccggcaagctcaccctcttcgtgttgctcacctgcatcgtcgccgccaccggcggtctcatcttcggatatgacatcggtatctcaggcggcgtgacgtccatgaacccgttcctggagaagttcttcccggaggtgtaccggaagaagcaggaggccaagacgaaccagtactgcaagtacgacaaccagctgctgcagaccttcacctcctccctctacctggccgcgctggtcgcctccttcttcgccgccaccgtcacccgcgccgtcggccgcaagtggtccatgctcgtcggcggcctcaccttcctcgtcggcgccgccctcaacggcgccgcccagaacatcgccatgctcatcgtcggacgcatccttctcggagtcggcgtcgggttcgcaaatcagtccgtgcctgtgtacctgtcggagatggcgccggcgcgtctccggngcatgctcaacatcggcttccagctgatgatcaccatcggcatcctggctgcggagctcatcaactacggcaccaacaagatcaaggcccggttacgggttggcgcg

SEQ ID NO: 1129 - DNA, 423 bp, Zea mays
atgcaccatggtagtacgtactacagaccctaccgctacgctacgctgtccttggaacgacagcggcgtaccgcgtacgcagcgcgcgaagaagctagctataccgacgaggcgacgacggcaagatcgggtcgagagggtagtagtagccgccggggaggtggagctggtcggcgccggcgaggtcggggcccgcgcagaagtccagcaggaagagggacgcttcgcctgcgccgttctccgccgccgaccagttgttggaggccgacgacgccgcggaggcggccgaggtggagccgtcggcggcggcggcggcggcggcgaacgggtccccgaggccgagcgccggcgccaggaagtcgtcgcaggtgtacgcctcggtcttcacggtcggtatggcgagcgacgggaacagcgaggacg

SEQ ID NO: 1130 - DNA, 423 bp, Zea mays
atgtacgtgccggcgctcatcacgctgctcaacgccgcctgcacgcccaggtcctgccacctgctcatcttctggatcctcttcgagaacgtcatgtccatgcaccgctctaaggccgccatcatcggcctgctggaggccagccgcgccaacgagtgggtggtcaccgacaagctcggcagtagcaaggcagctgcggctgtagtcgcgaagaagaagaaacagcagctggtccggagcaggtgctgcagcacgagacgggagatgcatgtgctggagctcgcgatgggggtgtgcttgctctattgcgctgtctacgacattgtcttctttggccgcgaccactactacatgtacctactcctgcaatcggcggcggcctttatcgtcggcttcggctacgttggcaccacgacaccctcc

SEQ ID NO: 1131 - DNA, 162 bp, Zea mays
atggaccaagttcatactggtttgggcggtgtacagctccttcttcacgcccctggaattcggcttcttcagaggcctccccaagaacctcttcttcctggacgtagctgggcagactgcattcctcatcgacatcgtcgtcaggtttttcgtggcgtaccg

SEQ ID NO: 1132 - DNA, 621 bp, Zea mays
atgccccccagacacaggcatgcactcccaaagcccaaccacataaacggcctagctagaggctatcgcggcgaccgagcctttccggcagcgtacgtagcagcagcccaccgccctttaagggccatatgccgccgcgccggcagtggttcaaggaggtcgcgcgcgcggtccgctcgagtgtggttcttctctcaagacccctgcgcctggtcgatgcggtgctgtgctgcatccttgatgtcgcgggccttggacgccagcctcgccttggcgtggtccagctggtcggcgcccggcgggtgcttgcccgtcaggtacttgtacatccaggagaacacggacagcgcagcgacgccgaggccgccggaggtgacgaacccggccgccatgagcgccagcgcgatggcggccggcaccagcaccgggctgaagatcaccagcacgggggtggccaccgtgagcgcgatcacggtgccggccaggatcagcccggacagcaccagcatcgacccgccgaaggtggcggccgtcgcggccttgagcgccgtcatcatggcgccctgcttctgctgctgctgcgcctcgccgtgcatgccgcccccgcgctggaggtcgccg

SEQ ID NO: 1133 - DNA, 327 bp, Zea mays
atgaaggcttttgcagatagtatttcaaactgggccgatgttgtgattgcatatgagcctgtttgggctattggaaccggaaaagttgctactcctgagcaagcccaggaagttcatgctgctgtacgcgattggttgacgaccaacatatcacctgatgttgcctctagcacccgaataatctatggaggttctgtgaatgcagccaactgtgcagagctagcaaagaaagaggatatcgatggttttcttgttggtggtgcctccttgaaggccccggacttcgccaccattatcaactcagtgaccgccaagaaagttgcagcc

SEQ ID NO: 1134 - DNA, 519 bp, Zea mays
atgctggtaaacctgcaggtgccctgggtcattttgggacattctgagcgcagagctctgttgggtgaatccagtgattttgttgctgataaagttgcatatgcactcactcaaggtctcaaggtaattgcttgcattggtgagacccttgagcagagagaggcaggaacaacaatggatgttgttgctgcacaaacaaaggctattgctgaaaaaatatcagattggacaaatattgtgttggcatatgaaccagtttgggctattggtaccggcaaagttgcaactcctgctcaggctcaggaggttcatgatggtctgagaaagtggctccactccaatgttagccctgcagttgctgaattgacaaggataatttatggagggtctgtaaatggagctaactgcaaagaacttgcagctcaaccagatgttgatggattccttgttggtggagcctcattgaagcctgaattcgtggacatcatcaagtctgccactgtcaagtcttcatctgcc

SEQ ID NO: 1135 - DNA, 504 bp, Zea mays
atgggctcggaggcggactgcgacaggatcaggggcccgtggagccccgaggaggacgacgcgctgcggcggctcgtggagcggcacggcgcgcgcaactggacggcgatcgggcgcgagatcccggggcggtcgggcaagtcgtgccgcctgcggtggtgcaaccagctgtcgccgcaggtggagcgccggcccttcacggcggaggaggacgcggccatcgtccgcgcccacgcccgcctcggcaaccgctgggccgccatcgcgcgcctcctccccggccgcaccgacaacgccgtcaagaaccactggaactgctcgctcaagcgcaagctcgccgccgcgtccgccccggcgggttcctccgacgtcgaggcgcgcccgaccaagcgcgtcagcctctcgcccgacagcccgtcggggtcggggtcggggtcagggtcagggtccgggtccgggtccgggtccgaccgtagggacttgacccacggcccccgcccaggt

SEQ ID NO: 1136 - DNA, 510 bp, Zea mays
atgaacgcgtgcccgcccagaacggtctcgatgggccggaggtacctggacgccgccgcccgtcccggcggcgccggcgccggcgacaccagctcgtgctcctgcttgcacgacctgcccatgtactgcaggatctggtccagcgcctcgtcgctggaggagtactgcaggcctccatggtgctggtgctggtgcgccgcagccgcagccgcagccgatgccttgccggcgccgccgtgcccatgctcgctgttactgctgccgtgcttgttgcccccgcccccacctgactccttgtggtggtgcttcttcttgaacaccctgcacaccacccagccgtcctcctgcccgccgtccgacgacgcggcggcagcagcagcagccgtggcggctgcgtcgtcgttggccacggcatcaccggatccagcagcagcagcagcagcggggtcgtcgaggcggtactcgtgcatgatccagtcggacttctggccgtgcggcgcgcggcccttg

SEQ ID NO: 1137 - DNA, 1041 bp, Zea mays
atggacaggatagtgtttgctgtgaccagtggaggttctttctccggatcagcagtagacacaaatatatcaagccctggtaaatccgaccgtccagtagggttggacggcgttggggtctcaaacttgtctttcaggacggcaaggtcggtggcccggttcacagggcacagctttggcagctggtcgagcagccatgaaaaaccaaaccagagttcgcagacaacagacatgccccagagccaaatggcatcctcattcttgtgcttaattctccaagtaaggaacagaccaaggacggccatgcggataagaatgagaagcctgtatgggctgagtactccagcagggatggaaagcttccgagtgagcggcctccatggcttggtggtgaactcggccggctgtccatcagctccacctccacccaagccgcctgcagcgtccacctcattctccttgggccagatagcattgccatacccatacgtccccttggtctcgaagagccagcggttgtggtcccagtctccggtctggctcctggtcatggccttctgggagcgcatgatggagagcctcctctccatcctggaagcagcggcgccaggcggcgggggcagcgagagcgtaggcctgcccccggctgtggcatcagcggcagcgccaacgacgtcgtcaagctccgtgttcttgtatggctccttgcacccggggcagatggcaccggcgttcttgacggcgttggcgaagcactcggcgcagatcttgaagtcgcactcacaggggaggatgtcgtcgccgcgctcgtcgctcatgacgttggcgtcgcagccgttgacggcgcaggaggagcccctggcccccgccatctgcgggtggctggcctccgagtcgatgaccttgtccatgaggtgcgcgcgcgtgacactgttgaagccgcccgtgaagagggagttggagacgtactgctcctccacgcgggcggagatggccgggtccatgggctggttgtcgggcgtggccgggatgtggacgtgg

SEQ ID NO: 1138 - DNA, 1239 bp, Zea mays
atggccgccgccgccaccacctcctcatcctcccacttgctcctcctctcccgccagcaggcggcctccctacgatgccgcctctccttcctcggccagcccgccagaaggtccggcagggtcacggcccaggcgccggccgctaaggacgtgcggtgcatggcggccgtggacactgcggcgtccgcggcggcggcggagacgagccccaagtcgagcagctacgagatcgtgacgctcacgacgtggctgctgcagcaggagcggaccggcgcgatcgacaacgagatgaccatcgtgctggccagcatatccacggcgtgcaagcagatcgccgcgctggtgcagcgcgcgcccatctccaacctcacgggcgttcagggcgccgtcaacgtgcagggcgaggaccagaagaagctcgatgtcgtctccaacgaggtgttctccaactgcctcaagtcgagcgggcgcaccggcgtgatcgcctcggaggaggaggacgtgcccgtagcggtggagcagagctactccggcaactacatcgtcgtgttcgaccctctcgacggctcctccaacatcgacgccgccgtctccactggctccatcttcggcatctacaaccccaacgacgagtgcctcgccgacgtcgacgacaacgacacccttgattcggtggagcagaggtgcatcgtgaacgtgtgccagccggggagcaacctgctggccgccggctactgcatgtactcgagctcggtgatcttcgtgctcaccgtcggcaccggggtgtacgtgttcacgctggaccccatgtacggcgagttcgtgctgacgcaggagaaggtgcagatccccaaggcgggcaagatctacgccttcaacgagggcaactacgcgctctgggacgacaagctgaagctgtacatggacagcctcaaggagcccggcgactcggggaagccctactccgcgcggtacatcggcagcctcgtcggcgacttccaccgcactctgctctacggagggatctacgggtaccccagggacaagaagagcaagaacggcaagctgcggcttctctacgagtgcgcccccatgagcttcatcgtcgagcaggccggtggcaagggctctgacggccaccagagaattcttgacatcacacctacagagatccaccaaagagtgcctctgtacattgggagcgtggaggaagtggacaaggtggagaaattcctggct

SEQ ID NO: 1139 - DNA, 678 bp, Zea mays
atggcgcaccggctgctgcgggacgcgcaggcggacgggtgggagcggtcggacttccccatcatctgcgagtcatgcctcggcgacaacccctacgtccggatgttaagagctgaatatgacaaagaatgcaaaatttgtgcacgtccttttactgtattccggtggcgtcctgggcgagatgcaaggtacaagaagactgagatctgccagacatgttgcaagctaaagaatgtctgccaggtctgcctgctggatcttgaatatggtctgcctgttcaggtccgagatacagcactctctatcaattccaatgatgcaattccaaggagtgatgtcaatcgcgaatattttgcagaagagcatgataggagggccagagctggcatagactatgattcatcctatgggaaggctcgcccaaatgataccattctgaagcttcaaaggacagcaccatattacaagaggaacagagctcatgtttgcagtttctttgtgcgaggtgaatgtacaagaggagctgagtgcccttatcgtcatgagatgcctgaaactggggagttatctcagcagaacattaaagatcgctactatggagttaatgatccagttgcactgaaacttttgagcaaggcaggtgagatgccatccctgacaccacagatgatgagacta

SEQ ID NO: 1140 - DNA, 969 bp, Zea mays
atggtgcagcaaacgctggggatgtcgctgccgatggcggcgttcgtgcccgagcagggcagcgccaataggctgaccaggccgccggggctgccgccgctgccgcaggcgttcgcggcccagcagcgcggggacgtgtgcatggaggccgtcgaccccgcggctggcccgcgcaaggcgcaccggcgctcccgcagcgacgtcccgttcggctacttcccgccggcgggccaccaccagctcccgccgcccaaggtggaggccggctggggcggccacctccccgccggcggcggcggcggcggcgacgacgacctgttcaacgcgtacctcaacctggaggggctggacgggctcaactcctccgacgaccgcctcgacgacggggacagccgcggcagcagcatgaggaccaacggcgccgacagcagcgagaacgagtcggaggagtgcgccgccgacagccgcgccgggatccgcctctgcgccgccgctgccgacaggcgggaggggctcaagagggccgccgctgcgcccgtggcgcgccacgccaggagcctgtccatggatagcctcatcggcaagctcaacttctccgccggcgcgacgggcgccgctagcggcgtcattccgggacccaacaggttcagcctcgagttcggcaccggcgagttttcgccggtcgagatgaagaagatcatggccgacgagaagctggcccgagatggcgctcgccgaccccaagcgcgtcaagagggtgctggccaacaggcagtcggcggcgcggtccaaggagcgcaagatgcgatacattggcgagctggagcacaaggtgcagatcctgcagacggaggccaccactctctccgcccagctcacgcttcttcagcgggactccgcggggatcgcgacgcagaacaacgagctcaagttccggctgcaggccatggagcagcaggcgcagctgcg

SEQ ID NO: 1141 - DNA, 558 bp, Zea mays
atgcaatgccccaactgccgcaaaattgagaaagggaattggctttatgcaaatggtttccgacctgcacatgatgttagcatggatgagtgggcccatgatgaagacctttatgatgttagctactcagaaatgccatttcgcttccattggtgtccatttggtcgcttagctcaacttccatctttatttgaggaaggagaatcatcacctccaattacattccatgacttcatgggacaacatgtgtttacggagcaagtagctgtatctgctgcaccagggacaactcatccttgcccatatgtggcatacttgcatcctcttccaccactgacatcgtcaagctcccatgtccctgagagaaccactgatcgtactgcataccatgatcattggaaccccatggttgggccatcagatgttaggcccatgcaaacaatgcaacctgctgatttccatcatagccattgggcacatgtgccccattcttatgctcaacccaacagcaacaatgagcagccaggaatcccttttgggaacaagggctacacgggt

SEQ ID NO: 1142 - DNA, 327 bp, Zea mays
atgcgcgcccacgcgtccatgaggtccagcgaccactggcagttgcggatgaggaagacgccggcgttgagccccacccacgaccgctcctcgtacacctcccgctcccacccgtacaccaccaggctgctctcgcggtaccgctccagcgggagggagaagtccatgtccgtgaacacggcgtcggcgtccacccaccacacccactcggcgtccgggtgcgccagcatcgcggcgcgcacgctggggatctttgcccagtacgccaccatggacggctccagcagcgcggtgttgtacagaagctcgatcccgtggaggcgccag

SEQ ID NO: 1143 - DNA, 999 bp, Zea mays
atggtttcgatgagcaccacgccgaagccgcttgactccgccgtcgtcagcgcagccgttgacggcggggatgagggtggtggtggaggcggtggcgggaagaagcaggcgcacggggcggtgatggcgccgccaccgatggtggtcccggccgcggcgcccgcggccgaggaggaggttcggaaggtcaggaagccgtacaccatcaccaagtcgcgggagagctggacggagccggagcacgacaagttcctcgaggccctgcagctttttgatcgtgattggaagaaaattgaagcatatgttggctcaaagactgttatacagataaggagccatgcacagaagtacttcctgaaggttcagaagaatggtacgggcgagcatctgcccccacccaggccaaaacgaaaggcagctcatccatatccacagaaggcatctaaaaatgtttctcaagctattttatcacaagaacaacctacccagagggagcaaggttctgtcatgcctatggatactgctactgtgagaaacacaaatgcgaatgtggcggtgccttcctgggacaatactcttgctcaacctttcagcgctggtcatgttcaaggtgcagctgcaacaaataactgttcaagtagcatggagagtccatctggtacttggccaacttctgaagcagtcgagcaagaaaatatggttccaccactccgtgccatgccagattttgcccaagtatacaacttcctgggaagcatatttgatccggatacaagtgggcatttgcagaggttaaaagcgatggatccagttgatattgaaacggcactactacttatgaggaatctttccatgaaccttaggagtcccgactttgagcaacatcggaggttgctatcatcatatagctatggtggcgcggaccatgtcaaatctgaagccatggaaaatcttggatctcctcagagtggccatcttccatccctggtaacaagcgaa

SEQ ID NO: 1144 - DNA, 669 bp, Zea mays
atggtcccttgcgaacgggtagaacgcgccaagctggatccagcggctgcagagctcctcggttgtgttgccgccgaagccgcagatgtcagcgccgaccatggggatgccgaagaggccgaagctgagcatggtgttgatggagtagcggaggtcgtcccacgtggcggcgttgtctccggtccagtgcgcggtgtaccggccggaccccacgaacgtggaccggctgagcacgaagggccggcggccggtgtcggcgagcagcgcgccgtgcgtggctcgcgcctccaggaagccgtagaggttgtgtgcgtcgtagtcgcgcacgccgccgtagtgcaccgcggacgccggcgtggtcttgttgttgatggggcggtgcacgccggagttgttgatgcggtacggcgggtcgtccagcgcgttgaggggcgccgggtcgacgaagttggagacctcgttcatgtcgatccagaggccgtcgacggggagcgtccgccggaacagggcgatctcgcgcgcccagaactcggcggcgcgcgggttgaggaagtccgggaagtagacgtacccgggccacaccttgccgaggtagtttggtgccgttccgcttcaggaacacgtcctgctgcattcctcgcacgtacgtcccgtatgtctcgttcacgc

SEQ ID NO: 1145 - DNA, 765 bp, Zea mays
atgggggcggcgccgtcgtccgacgactcgtcacgcgccggagacggccgggctgtggcgagcagcgctgcctctggcactggcagcaacagccaccaggcccagtcgaagcgggcgccgccgcctcacaagttccacgagatagttgcgcaggaggcgacgacggccggcggcggcggcggcactgctgctgcagccgagctggaggatcaggcgtgcagcaccggggtgtacctggctgggaaaaccaagaagtactgggtggacgagaagaccaggtgcaactgcttcgtgctgttcgctagagcgctgtccatcacttggggcgacgatcccagatactggatctggcatcccgtcagagaaaccaatgacgccgagatcgtcgaggctgcgtcgctgcagaacgtgtgctggctggaggtgcacgggaggctggagctgtcgcacctcacgccggggtgcagctacgacgtggccttccaggtgatgctcacggagccggcgtacgggtggtcggtgccggtgaacctgcggctcaggttccccgacggcacggctcaggcgcggaaggagaagctgcaggggaggcccacgaagcagtggctggagctcagggccggggaggtgaaggcgccggcccagccggggggagcgggacgcagcggcgagcttgagatctccctgttcgagtacgacggcgggctctggaagaaggggctcctcgtcaagggcatcaagatcgtcccgaaggagagtgattat

SEQ ID NO: 1146 - DNA, 435 bp, Zea mays
  misc_feature (50)..(50): n = any nucleotide
atgagtggacatgttgcacccccaaagtcatcgaacttctttgttgaatntgggatggacagtggatatcacaaaaaatctacatccagttcatccaaagtgcagattgaggaaagcagtgaagcaagacagaaattctcgaatgcaaaatcaatttcatcctctcagttttttggtgatcaggccagtttcgaaaaggacactcaagtctctctccaaaagttttctggttcctctgccatatcaagtgctgatctatttggccatccagcaaacaattctagcgtggatctcagtgcttcagatttgatcaacagaatatcattccaggccactcaagatctgtcttctctcaagaacatggcaggggaaactgggaaaaggttgacatcgatggcatccaacatcatcactgatcttcaggaccgcatcctc

SEQ ID NO: 1147 - DNA, 678 bp, Zea mays
atgtcctcctcctcgtccgcggtcgccgccccgatcgagcacttcgtgctcttcaaggcccgcccggaggcggtggcctcgggcgccgcggcggcgatggtctcctcgctgcaggcgctggccacgctcgtcccgggcctggcctacatccacgcaggaccggtgctccgcctccgatccccggccgcggaggcgctgggccccacgcacctcctccacacccgctacgccaccaaggaggacctggcgtcctacgcggcgcacccggcgcacgtggccgccgtgcaggggcacgtcctccccaacgcgctcgacatcaccgccgtcgactgggtcaacgccgcgccgctcccgtcccccgtggcccccggcagcgccgtgcgcctcacgctggcgaaggtgaaggaaggggtggaggtcgcgcagctcgtggagaaggtggccgcggcgacccaggccgccggggacgccaaggtgagcttcggggagaacttttccccggcgcgggccaaggggtaccagttcgggatggtggcggtgttcgacagcgtggaggagctggacgccgtggaaggggacggcaaggtggaggaggccaaggccttggtcaggccgctgctggacgaggtgatggtcctggacttcgtcgtcggagatgctccaacgcccgcgagcctc

SEQ ID NO: 1148 - DNA, 258 bp, Zea mays
atggatcatttccaaaacatgccctgctgtatcaccccaacctttctccaggccccactcttgaaattggccgtcgacaagctcctccttgaagcggaggtactccgagactgtgagctgctcgacgctgagctcgtgaacgttgacgcggacgtactcccaaactcccgggcgcgggcgcaccgcgatggccacgaacggcggcagcacgatcgcctcctgcgcggagcggaggacgtcgaggaagggtccctcggc

SEQ ID NO: 1149 - DNA, 675 bp, Zea mays
atggcgatggtgctggggatggtgctggggaagatcccggtggagacgcccaagcacgaggtcctccacaccggcgccggctacgagatccgcaagtacccgcccagcatcgccgcggagttgacctacgatcccaaggagatgagaggagaccctgatggcgggttcaccgtcctcgccaactacatcggggtcctcggaaagccgcagaacaccaagcccgagaagatcgccatgacggctcccgtcatcaccaccggcagcggcagcggcggcgacggcgagaagatcgccatgacggcccccgtcatcaccaccggcggcggcgagcccgagcccatcgcgatgaccgcgccggtgattacggacgaccagcaggcgccgggcaaggtgacaatgcagttcctgctgccgtccaagtacaccagggtggaggaggcgccgcggccgacggacgagcgggtggtgatccgcgaggtgccggagaggaagttcggcgtggcgaggttcagcggggtggccacggacaggacggtgagggagaaggcgaagggacttaaggccgccctggagaaggacgggtacaccatcaaggtcccgttcgtgctggcgcggtacaacccgtcgttcacgctcccgccgctgcgcaccaacgaggtcatgttccccgtcgag

SEQ ID NO: 1150 - DNA, 840 bp, Zea mays
  misc_feature (750)..(750): n = any nucleotide
atggcgaacaggggcttgcatctggctctgttcctcgtccttctcgggctgtcgtccaatttggcagccgggcagatcctgttccagggcttcaactgggagtcgtggaagcagaacgggggatggtacaacttcctgatgggcaaggtggacgacatcgccgaggccggcatcacgcacgtctggctccctccggcgtcacactctctcgccgagcaaggctacctgccggggcgcctgtacgaccttgacgcgtccaagtacggcaacgaggcgcagctcaagtccctgatcgaggcgttccacagcaagggcgtgaaggtcatcgccgacatcgtcatcaaccaccgcacggcggagcaccaggacggccgcggcatctactgcatcttcgagggcggcacgccggactcccgcctcgactggggcccccacatgatctgcagcgacgacagggcgtactccgacggcacggggaaccccgacaccggcgccgacttcggcggcgcgccggacatcgaccacctgaacccgcgcgtccagcaggagctcaccggctggctcaactggctcaagacggacgtcggcttcgacgcgtggcgcctcgacttcgccaagggctactccgccgacgtcgccaaggtctacatcgacggcacccagccctgcttcgcccgtcgccgagatatggacctcgctggcctacggcggcgacgggcaagcccttctacgaccagaacgcgcaccggnaggagcttggggagctggctggaacccctcctgggcaaggcagtcccggccccacgttcgacttccccccaaggcatcctcaagtggccg

SEQ ID NO: 1151 - DNA, 495 bp, Zea mays
  misc_feature (37)..(37): n = any nucleotide
  misc_feature (96)..(96): n = any nucleotide
atgacctccttgcctacgccgcgagcgcaagcccttntacgaccagaacgcccaccgccaggagctgttgagctgttggaccgcgtcgcgcaaagncgcagcccggccaccacgttgacttcaccaccaagggcatcctcaacgtgccgtcgacgccgagctgtgcggctgcgcgcgctgacggcaaggcacccgtttgatccgggtgtggccgacccaaggccgtcacttttgtcgacaaccacgacactggctccacgcagcacatgtggccgttccccgccgacaaggtcatgcagggctacgcctacatcctcacgcaccccgggaacccatccatcttctacgatcacttcttcgactggggcctcaagaacgagatcgcgcacctggtgtccatcagggaccgccacgggatccaggcggacagtgagctgcgcatcatcgaggccgacgccgacctctacctcgctgagatcgacggcaaggtcatcg

SEQ ID NO: 1152 - DNA, 603 bp, Zea mays
atggccgccggggaccttgaggtgctcaccgcgctcgacaccgcgaagacgcaatggtaccacttcaccgccatcgtggtcgccggcatggggttcttcaccgacgcctacgacctcttctgcatctccctcgtgactaagctcctcggccgcatctactacaccgtggaggggtccgcgacgcccggcaccctcccgccgcacgtgtccgcgtccgtcaacggcgtggccttcgtgggcacgctgtcagggcagctcttcttcggctggctgggcgacaagctcgggcgcaagaaggtctatggcatgacgctcatgctcatggtcctctgttccgtcgcgtcggggctctcgttcggccacaccccggcgtccgtcatggcgacgctgtgcttcttccgcttctggctcgggttcggcatcggcggcgactacccgctgtcggcgaccatcatgtccgagtacgccaacaagaagacgcgcggcgcgttcatcgccgcggtgttcgcgatgcagggcttcggcatcatggccggcggcctcgtggccatcgtcgtgtccgcgtcgttcaagggcaggttccccgccccggcctacgccgtc

SEQ ID NO: 1153 - DNA, 963 bp, Zea mays
atgcacgcggcggcgtcggccggagaggaagctgggggagggctcgccaagacgctgcagctgggggcgcttttcgggctctggtacctcttcaacatctacttcaacatctacaacaagcaggttctgaaggttttgccataccctataaacatcacaacggtgcagtttgctgttggaagtgccattgctttgttcatgtggatcactggtatccataaaaggccaaagatttcgggtgcccagcttttcgctatccttcctctagctattgtccataccatgggcaatcttttcacaaacatgagccttggaaaggttgcagtgtcatttacacatactataaaggccatggaacctttcttctcagttctcctttcagcaattttccttggggagttgcctacgccatgggttgtgttgtctcttcttccgattgttggtggtgtagctttggcatcccttactgaggcctcctttaactgggctggattttggagtgcaatggcttcaaatgtaaccttccagtcaaggaatgtgctaagcaagaaacttatggtgaagaaagaggaatctctcgacaacattaacctattctcgatcattacagtcatgtcattcttcctgttggccccagtaaccttacttacagaaggtgttaaagttagtccagcagtgttgcagtctgctggtttgaacttgaaacaggtatacacaaggtcattgattgctgcattctgcttccatgcataccaacaggtatcatacatgatcctcgccagggtatccccagtcacacattcagtgggcaattgcgtcaagcgtgtggtggtcattgtgacctctgttctgttcttcaggacccctgtttctcccatcaactctcttggtaccgggatcgctcttgctggagttttcctatactcgcaattgaagagacttaagcccaagcccaagactgct

SEQ ID NO: 1154 - DNA, 1164 bp, Zea mays
atggcctctgccaccgtgctcaagtcctccttccttcccaagaagtccgaatggggcgccaccaggcaggccgccgcgcccaggccgcccaccgtctccatggtcgtccgcgcctccgcctacgccgatgagctcgtgaagaccgcgaaaacgatcgcgtcgccggggcggggcatcctggcgatggacgagtcgaacgcgacgtgcgggaagcggctggcgtccatcgggctggagaacacggaggccaaccggcaggcgtaccgcacgctgctggtcacggcgccgggcctgggccagtacatctccggcgccatcctcttcgaggagacgctgtaccagtccgccgtcgacggccgcaagatcgtggacatcctggcggagcagggcatcgtgccggggatcaaggtggacaagggccttgtcccgctcgccggctccaacaacgagtcgtggtgccagggcctggacggcctggcgtcccgcgaggccgcctactaccagcagggcgcgcggttcgccaagtggcgcaccgtcgtcagcatccctaacggcccctccgagctcgccgtcaaggaggccgcgtgggggctcgcacgctacgccgccatctcacaggacaacgggcttgtgccgatcgtggagccggagatcctgctggacggcgagcacggcatcgagcgcacgttcgaggtggcgcagaaggtgtgggccgaaaccttctacgccatggcggagaacaacgtcatgttcgagggcatcctgctgaagccgtccatggtgacgcccggcgcggaggccaaggacagggccaccccggagcaggtggccgcgtacaccctcaagctcctccaccgccggatccccccctccgtgcccgggatcatgttcctctccggcgggcagtcggaggtggaggcgacgcagaacctcaacgccatgaaccaggggcccaacccgtggcacgtgtccttctcctacgcgcgggcgctgcagaacacctgcctcaagacctggggcggccagccggacaaggtcaaggcggcgcaggacgcgctgctgctgcgcgccaaggccaactccctggcgcagctcggcaagtacacctccgacggcgaggccgccgaggccaaggagggaatgttcgtcaagaactacagctac

SEQ ID NO: 1155 - DNA, 558 bp, Zea mays
atggagatggtggaggacgtgcagatcgttctgctgggcacgggcaagaagaagttcgagcgcatgctcatgagcgccgaggagaagttcccaggcaaggtgcgcgccgtggtcaagttcaacgcggcgctggcgcaccacatcatggccggcgccgacgtgctcgccgtcaccagccgcttcgagccctgcggcctcatccagctgcaggggatgcgatacggaacgccctgcgcctgcgcgtccaccggtggactcgtcgacaccatcatcgaaggcaagaccgggttccacatgggccgcctcagcgtcgactgcaacgtcgtggagccggcggacgtcaagaaggtggccaccaccttgcagcgcgccatcaaggtggtcggcacgccggcgtacgaggagatggtgaggaactgcatgatccaggatctctcctggaagggccctgccaagaactgggagaacgtgctgctcagcctcggggtcgccggcggcgagccaggggtcgaaggcgaggagatcgcgccgctcgccaaggagaacgtggccgcgccc

SEQ ID NO: 1156 - DNA, 1383 bp, Zea mays
atgctgccgctggacacggtggggccaggcggccagctgtcgcggcagcgcgcgttggcggccagtctgatggcgctgcggggcgccggggtggagggcgtcatggtggacgtgtggtggggcgtggtggagcgggagggccccggccgctacgactgggaggcctacgccgagctcgtgcgcatggtggagcgagccggcctccgactccaggccgtcatgtccttccaccagtgcggtggcaacgtcggcgacacctgcaacatcccgttgccgccatgggtgctggaggagatgagcagcaacccggacatcgtgtacacggacaggtccggccgccggaaccccgagtacatctccctcggctgcgacacgctgccggtgcttaagggccggacccccatccaggtctacaccgactacatgcgcagcttccgcgagagattccgtgactacctcggcaatgtcatcgcggagatccaagtgggcatgggtccttgtggagagctgaggtatccttcataccctgaggccaacggaacctggcgtttcccgggcatcggcgagttccaatgctatgataagtacatgcgggcttcgctggaagcggcggcggtggcggcgggtcaccaggagtgggggaggggcggaccccatgacgccggggagtacaagcagatgcccgacgacacgggcttcttccggcgcgagggcacttggagcacagagtacgggcatttcttcctggcgtggtattcaggcatgctgctggagcacggcgaccgcgtccttgccgcggccgaggccgtgttcggcggcacgggcgcaacgctctccgccaaggtcgccggcatccactggcactaccggactcggtcccatgcggcggagctcacggccgggtactacaacacgcgggaccgcgacgggtacgcgccgatcgcgcgcatgctggccaagcgcggcgccgtgctcaacttcacatgcatggagatgaaggacgagcagcagccgaaacacgccagctgctccccggagctgcttgtgcagcaggtcaagaccgcggccagcgccgccggggtggagctcgccggcgagaacgcgctggagcggtacgacgaggcggcgttctcgcaggtggcgtcgacagcgcgcggcgccggcctggccgcgttcacgtacctgcgcatgaacaagacgctctttgacggcgacaactggcggcagttcgtgtccttcgtcagggccatggccgacggcggcgcgagaccagcactgccacggtgcgacacggggcactcggacctgtacgtcgggttcctcgacgccgccaagaagagcaaggcgccggaggctgagggcgccgccaccgccgcggcattg

SEQ ID NO: 1157 - DNA, 636 bp, Zea mays
atgtatgatttcatggccctcgatagaccttcaactcctaccattgatcgtgggatagcattacataagatgattagacttatcacaatgggtttaggaggagagggctatcttaatttcatgggaaatgagtttggacatcctgaatggatagattttccaagaggtccgcaaagacttccaagtggtaagtttattccagggaataacaacagttatgacaaatgtcgtcgaagatttgacctgggtgatgcagactatcttaggtatcatggtatgcaagagtttgatcaggcaatgcaacatcttgagcaaaaatatgaattcatgacatctgatcaccagtatatttcccggaaacatgaggaggataaggtgattgtgttcgaaaagggagatttggtatttgtgttcaacttccactgcaacaacagctattttgactaccgtattggttgtcgaaagcctggggtgtataaggtggtcttggactccgacgctggactatttggtggatttagcaggatccatcacgcagccgagcacttcaccgccgactgttcgcatgataataggccatattcattctcggtttatacaccaagcagaacatgtgtcgtctatgctccagtggag

SEQ ID NO: 1158 - DNA, 879 bp, Zea mays
atgacgccaacagatccataccctctgccagacagaggcggtcgcccggcgccacgaccgctccctgcctcctccgcagccacggccgcggccgctgccgttgcgtacctgtaccggcggccgaccgggttccgcagccgcgcggtggggatcatacccgcgcgcttcgcctccacgcgcttcgagggcaagccgctcgttcccatcctcggcaagcccatgatccagagaacatgggaaagagttatgctagcttcttcgttggaccatgttgttgtggcaacggatgatgagagaattgcagaatgctgtcgaggatttggagctgatgttataatgacatcagcatcttgcaaaaacggatctgaacgctgctgtgaggcactaaagaagcttgataagcactatgatattgttgtcaatattcaaggagatgagcctctcattgaaccagagataatagatggtgtagttatgtcactgcagcgagctcctgatgcagtcttcagcacagctgttacttcactgaaaccagaagatgcattcgatacaaacagggtgaagtgtgttgtggataatctgggctacgcaatatacttttcaagagggctgattccattcaataaatcagggaacgccaatccaaaatatccatatcttcttcatcttggaatcgcgggctttgattcaaaatttttgaagatatatccagaacttccaccaacaccattacaaatggaagaggacctagagcaactaaaagttcttgaaaatggctataggatgaaggtgatcaaagtggaccatgatgcccatggtgtggatgcacccgaggacgttgagaaaatcgaagcactgatgcgaacgagaaacattcag

SEQ ID NO: 1159 - DNA, 654 bp, Zea mays
atggtgctgtgggtcttcggctacggctccctcatctggaaccccggcttcgacttcgacgacaaaatcctcggcttcatcaagggctacaagcgcacctttaatctcgcttgcattgaccacagaggcacaccggagcatccggcgaggacctgcacgcttgaaaccgacgacgaggccatatgctggggaattgcatattgtgtcaagggtggtccagaaaaagagctaaaagcaatacagtacttggagagaagagagtgtgagtacgaccagaaaatatccattgatttctacaaggaaggagatcccttgaaaccagctgtgacgggcgtcttagtgttcgtttccactccagatccaattggcaacaagtactatcttggccctgctcctctgcaggatatggcaaggcaaattgctacagccaatggccctactggctataatagggattacctgttctcaatggagaaggcattagccagcattagccacgaagatgattcgatcatagagcttgcaaacgaggtgaggaaggtgctcaacagaacaaaggagaccaagatcactggtgccaatgcttccatgaaatcacatgcccctcttgtgcacctgtccgcgcttccagaaggcaccgttgtggactcgaga

SEQ ID NO: 1160 - DNA, 1047 bp, Zea mays
atgcacgcaggacgagccggcgcaaccctccacgcacttctcgacgcactggtccacccgctccgccgcacgctgctgcatcagccggtccttctcctcgaagtacaccgacgccgccttctccgccgcgcgttccttcgccgcgcgctcgtcctcgccgcccagccggacgtcgacgtgctgaccttggcccagcgtcagcttctccttgatcgcgcccgtcacgttccccagcgcccccagcagaccttgtccctgctccctatcagtgtcgtgagtgctggccgtctccctagccttgtcagcggcggtctgtgctgtggctcgggacctgtccctggcctcctgcgcggcctccctgctggcgtcggtgtactcgcccgccttctgcctggtcacgtctctcgcctccctcgccttgtcggcggtggcgtccctcgtctcctgggccttctgcatggtcgcgtccttggcctccctcgccttgccggcggtggtgtccgcggccctcccgcgccttgccggccgccgcgtccttgtactccccgagcttgttcttggtcgcctccgcggtctcgctcgtcttctgcgccaccgcgtccttggtctccctcgccttctccacggcgctgtccttgtactcgcccagcttgttccgggtggcctccgccgtctcgcccgtcttacgcgagacgctgtcgttggcctcccgggccttgtcggcggtgtagtccctgtactcgccgagcttgtcgcccgcggtgtgcgccgtctgcgaggtcttgtccacggtcgcgtccttggcgccaccgaaggtgcggcccacggcgctggccaaggacctggcgccctcctgcacgctctccaggatgccgccgccaccggcggcaccgcggtcggcgcgggagcgcgcgatctcgtccgcggccgagcgggcgttcacctccgccttctcgaggtgctcgtcccgcgcccgagccagctcctccacggcgcgccgcgcgtcggcctcggcgcgcgcctcacgcgtgttctgcctcgatgcca

SEQ ID NO: 1161 - DNA, 1032 bp, Zea mays
atggagggcggcaagcccacgattgttaccaacgcagagggggcgcggaccacgccctcggtggtggcgtacaccaagtccggcgaccgcctcgttggccagatcgccaagcgccaggccgtggtcaacccggagaacaccttcttctccgtcaagcgcttcatcggccgcaagatgaacgaggtcgacgaggagtccaagcaggtctcgtatctcgtcatcagggacgacaacggcaacgtcaagctcgattgcccggcgattggcaagcagttcgcagctgaggagatctccgcacaggtgctgagaaagctggtggatgatgcatcaaagtttttgaatgacaaggtcacaaaggcagtgatcacagtccctgcttacttcaacgattcacaaaggacagcaaccaaagatgctggccgcattgctgggctggaggttctgcgtattataaatgagcctaccgccgcatcactagcatatggttttgagaaaaagaacaatgaaacaattctggtttttgacctcggaggtggcaccttcgatgtttcagttcttgaagtcggtgatggtgttttcgaggtgctgtctacatcaggtgacactcaccttggtggtgatgactttgacaagagaattgtagattggctcgctgggaacttcaagaatgatgagggtattgatttgctaaaagataagcaagcactgcagcgattgacagaagcagctgagaaggcaaagatggaactgtcatctttgacccaaacaaacatgagcttgccttttattacagctactgcagatggtcccaagcatattgagactactcttaccagggctaaatttgaagagctatgctcagatctccttgacaggctgaggacccctgtggacaatgcccttagagatgcaaagttgcaattcaaagatattgatgaggttattcttgttggtggctcaactagaataccagctgttcaggagcttgtcaagaaaatgacagaaaaggacccccaatgtaccagtcaaccc

SEQ ID NO: 1162 - DNA, 1164 bp, Zea mays
atgaggttcgctccacccccggcggctgcactgggcgatgcaatgttgcatggatttggggtcggggaggacgacgacgtccgcgcgcctctgcctgtgaagagggagactctgtacggcgagggcatcgtatccgtcatgcgacctaatgcatcagctgcatttcgtaactttgaacaagaagcaagacaatctgctgtttgggactctgaccagaatgctacatctagttctggtgataatcttgcttctttataccgtccacctttttctttgatgttcaacggaccctttgacaaggcaaagttagaggcttcttccctggacaaatggctattaatcaatttgcagtcgacagcggaatttagctctcacatgcttaatcgagacacttggggaaatgatgcggtggctcagttgattcggtcaaattttattttctggcaggtttattatgacaccagtgaggggaggaaggtatgcacctactaccatttggtgtccatgcctgctattctcctaattgaccccgtcactgggcaaaaaatgcatgcttggaatggaatggttcacccagatcgtttacttgaggatttactaccttacctggataaaggtccgaaggagcaccatgcagctcaacctcaaaagcgcccaaggaaagttgatccggaagcttctacgggcaagcaaggcaaaatagctgtagaggatgaagatgaagagctagcacgggcagtagcagcttctctagaggagagtaaagaagtcattgaagcatcagacgccagtgatgacatggttgaagctgaacccgaggaggaaaatgagcccaccctaaacaccaagcctgattaccctcctttccctgaagaacctacaggaagcaggggccttttttgcagggttgggatttgggtaccgaacaaccggaggatccaaaaaaacttccttcccccagatcctatcaaggttttgtggtcattttgcgctcctcaggttgaggacggggaaaggagggctttcccctttgtccaggcaatttctggggcatcccagaaactggagttgggaagcggcctaacattcaaggaagccggggtggccaactcgatgatcaaccttttgttgggtttaaccgcccgctttttcaacctgcccttt

SEQ ID NO: 1163 - DNA, 495 bp, Zea mays
atggcggcggcggcggccggcggcgagaacagcggcgcgggcgcgggcgcgggcgagggcgagttctacctgcggtactacgtggggcacaagggcaagttcgggcacgagttcctcgagttcgagttccgccccgacggcaagctccgctacgccaacaactccaactacaagaacgacaccatgatccgcaaggaggtcttcgtctccccctccgtcctccgcgaggccaggaggatcatccaggagtccgatatcatgaaggaggacgacagcaactggcctgagcccgaccgcatcggccgacaggagctcgagatcgtcatgggcaacgaacacatttcattcaccacttccaagatcggctccctcgtcgatgtccagtccagcaaggacccggagggactccggatcttctactacctcgtccaggatctgaagtgcttcgtgttttcactcatcaacctccacttcaagatcaagccaatccagtct

SEQ ID NO: 1164 - DNA, 555 bp, Zea mays
atggcggcggcgggccgcagcgaccgcgccgcgtcccccgcgcctccgtccgccacagcggacggcgcccggccggtggtggaggtcgccgcgccggcggagaccgcgcgccgcgccaagatcggggtgtacttcgccacgtggtgggcgctgaacgtgatcttcaacatctacaacaagaaggtgctgaacgcgttcccgtacccgtggctcacgtcgacgctgtccctcgccgccggctccgccatcatgctcgcgtcctgggccaccaggatcgccgaggcgccccagacggacctcgacttctggaaggcgctcactcccgttgctatcgcgcacacgatcgggcacgtcgcggcgacggtgagcatggccaaggtggccgtttcgttcacgcacatcatcaagagcggggagccggcattcagcgtgctcgtcttcaggttcttcctcggcgagcacttcccggcgccggtatacttctccctcctcccgatcatcggtgggtgcgcgctcgccgccgtcaccgagctcaacttcaacatggttggtgag

SEQ ID NO: 1165 - DNA, 618 bp, Zea mays
atggctaagatcgccgcggcggcggcggcggcgctgtgcttcgcggccctggtggccgtggccgtctgccaaggcgaggtcgagcggcagaggctcagggacctgcagtgctggcaggaggtccaggagagcccgctcgacgcgtgccgccaggtcctcgaccggcagctaaccggcggcggcggcggcggcggcgttggcccgttccggtggggcaccgggctccggatgcggtgctgccagcagctccaggacgtgagccgcgagtgccgctgcgccgccatccggagcatggtcaggggctacgaggaggccatgccgccgctggagaaaggctggtggccatgggggcggcagcagcagccgccgccgcagggaggaggaggaggacaggggggctactactacccctgcagccggccaggagagggatacggctacggtcagggtggccagcggcagatgtatccaccgtgtcgtcccggcaccaccggcggcgggccaaggatcggccgcgtgaggcttacgaaggcccgggagtacgccgcggggttgccgatgatgtgccggctgtcggagccccaggagtgcagcatcttctccggcggcgaccagtac

SEQ ID NO: 1166 - DNA, 597 bp, Zea mays
atgcactccgggtggaacgcgtgggagcagtgcggcagcaggcggaggtcgtcgtcgtcctcgaacgccgtcaggcacaccgcgcactccagcacgcccttgccgatcttgtgctccacgacctccctgtacgacacaatcgggaacgtggcgacgaccgcggggtccagcccgcgcttccccctcctggacgggcccccgcccccgccgccggctgccgctgccgctgccgctgccgccgccgccgccccggggtccgctaggcggcactggttgatgtacgcgcagacgaagagcaagaagaagaagacgctgatggccaccgtgatgaaggtcgacatggtgcggccgaactgcgtctgttgcggcggcgcagaaggcgtctgccgaggcggcggcgccggcgccgactgcgcctgcgcgtccacgacgacggccatgccggcgccgaggaggcagaacacgaggagcagctgccgcgtctccatcgctcctcgcgaagcacgcacgcagaggcacagatttggggaaacggcaccacttctgccgccggtctgtctgctgtggagcgaatcctgctttgacggcacgagaaag

SEQ ID NO: 1167 - DNA, 678 bp, Zea mays
atggggcttgactattacaagatcctaggcgtcgacaagggcgccaccgatgacgacctcaagaaggcctaccgcaagctcgccatgaaatggcaccccgacaagaaccccaacaacaagaaggaggccgagaacaagttcaagcagatctcggaggcgtacgaggtgctgagcgacccgcagaagcgcgcggtgtacgaccagtacggcgaggagggtcttaaggggcaggtgccgccgccgggcgccggcggggcggggcccggcggcgcaaccttcttctccaccggcggcgacgggccgacggtgttccggttcaacccgcgcaacgcggaggacatcttcgccgagttcttcggcggctccagccccttcggcggcatgggcggcggtggcatgggcggcagcggcatgggcggtgggatgcccggcatgcggagcggcggtacgaggttctcctcctccatcttcggggacgacatattcggctctgcgttcggcggcggcccggacgggcacggcatgcacgccggcgggcgggccgtgaaggcgccggccatagagcggaagctgccgtgcagcctcgaggagctgtacaagggcaccaccaagaagatgaagatctccagggaaatctctgacccccagtgggaagacgatccccagtggaagagatcc

SEQ ID NO: 1168 - DNA, 453 bp, Zea mays
atgcgccgaagggcgaatccggagcgccgctttgcgggcgacggggacgacggcgcggagctggactcgctgcggggcgacgtgacgacggacagcgccgccggccgccgcagcatggtcaagctccgcgtcacggcgcccggaggcggcgcggagcccgccgccgccgccgccgccaccgccgccgacgacgacgacgagggggagaaggaggcgtacttgcggagcttgccgaggccggagtccgggcgcggcccggccaccgtgtcgtcccacagctggttcaggagccccatatatgcaccggtgcgtgcgcgtcctacgtacgtgcgaagtggccggccggcgacggcgtggtgcgcgttttgcttcgagagcgatgctcttgctctgtttcctttggttctcttgtttgatgttttcgttgtccttggggcgagaggaagagaggcg

SEQ ID NO: 1169 - DNA, 867 bp, Zea mays
atggtggacgttaagagggccaggacaagagctccacgaaaccagggcgagcagcactcgcagcctcagcaggctgagcaaggccggggtcaggggaaccaagacaatcagtcgcccgctggtaatggtaccgctgactgtggcaacagtgtgagctatgattcaaaaaaggtattcattggcggtttgcgggataatatcaccgagaaggagttccgggcttactttgagacgtttggcacggtaacggacgtcgtggtgatttatgacagcgcgacgagccggtcgagggggttcggtttcgtcacctttgattcggaggaagcagtggggaaggtgatgcggcagagctttcacgacctgaacgggaccaaggtagaggccaagattgctatccccaaggatgagcagtattaccgtaacagaggaggccatggtgctcgtccctttggcgggagggatcctgccgctcctggctatggagggttcatgtaccaaacatacaatgctagatctggcccctacaatggctacatgccccaacctgctcccacacatccctactttcctgccccctattttgctgcggggggctatccctatgggagtggatacccaggtcaaggcgtcatgccaaacattcctggcatggggcctaggcggggtcctccggcctatggaacataccctcaaatgtatccggtgtataacattatacatagagctggttatggtggtccagccacttcttttcagcatgaaattaatggtggaggtgattacaaaaaggatcaaacgaatgtagatatgcagcaagttgacaacactgctagcgttgcgacaaagttggaaaatatgaagctaggt

SEQ ID NO: 1170 - DNA, 606 bp, Zea mays
atgggtgttactcactgtaccattgcccatgcgcttgagaaaactaagtaccctaactccgacctctactggaagaagtttgaggatcactaccacttctcgtgccagttcaccactgacttgattgcaatgaaccatgccgacttcatcatcaccagtaccttccaagagatcgccggaaacaaggacaccgtcggccagtacgagtcacacatggcgttcacaatgcctggcctgtaccgcgttgtccacggcattgatgtgttcgaccccaagttcaacatcgtgtctcctggcgcggacctgtccatctacttcccgtacaccgagtcgcacaagaggctgacctcccttcacccggagattgaggagctcctgtacagccaaaccgagaacacggagcacaagttcgttctgaacgacaggaacaagccaatcatcttctccatggctcgtctcgaccgtgtgaagaacttgactgggctggtggagctgtacggccggaacaagcggctgcaggagctggtgaacctcgtggtcgtctgcggcgaccatggcaaccccttccaagggacaaggaggagcaggccgagtccaaaagatgtt

SEQ ID NO: 1171 - DNA, 588 bp, Zea mays
  misc_feature (553)..(553): n = any nucleotide
atgtcgcgcgcgcaggacgggatcctcaggtacatgctcaagatgatggaggtctgcaacgcgcagggcttcgtgtacggcatcatcccggagaacggcaagcccgtcaccggcgcctccgacaacctccgcgcctggtggaaggagaaggtccgcttcgaccgcaacgggcccgccgccgccgccaagtaccaggcagacaccgccgccgcgggaggcggggccgcggacgggtgcggaggcgccgacgcggaaggccagcatcactccctgcacgagctgcaggacaccacgctgggctcgctgctctccgcgctcatgcagcactgcgacccgccccagcgccggttcccgctcgagagaggcgtgccgccgccgtggtggccgctggccgccgtgcccgtacaagaagccgcacgacctcaagaaggcgtggaaggtgggcgtgctcagggccgtcatcaagcacatgtcgcccgacgtcgacaaggcgcgccgcctcgtccggcagtccaagtgcctgcaggagaggatgacgccagggagatggtcncgtgggtcgccgtgctcaggcaggaggaggagctc

SEQ ID NO: 1172 - DNA, 267 bp, Zea mays
atgggtctgcaggaggaatttgaggagcatgctgagaaggcaaagaccttgcctgagagcacgagcaatgagaacaagctgatcctctacgggctctacaagcaagccacggttggagatgtgaataccgatcgtccgggcatattctaccaaaaggacagggccaagtgggatgcctggaaggctgttgaaggcaaatcgaaggatgaggcgatgaatgactacatcaccaaggtgaagcagctccaggaggaggctgccgcctct

SEQ ID NO: 1173 - DNA, 222 bp, Zea mays
atggaagttctagacgaacttcttggaaaagaaaacatggagaacagcggtatttcgagcactgatgagaattatgctgaaaaaactggagatgatatcttgtttgaggatggcgttctgattgagaatgggttagccactgcttatgaacatgatttgctttggggttggaaggccctgcagcagctgctgatgagcctgggtttcaaaatggatacaaca

SEQ ID NO: 1174 - DNA, 393 bp, Zea mays
atggcgttgtcggtgcggccggagaggaggcgcgcgatggtggcccacttgttgccgaacctggcgtgcgcgcggaggatggtgtcgtcctcctcggccgtgaagggccggtgctccacctgcggcgacagctggttgcaccaccggaggcggcacgacttgccggagcggcccgggatggaccggctgatgagggaccagttgcgggcgccgtggcgggccaccaggcgctgcagggcctcgtcctcctcggggctccaggggcccttgatccggtccacgtccgacttgccgccgctgccacggcaggacggagaagacgacgccatgctttactcaagactagttctgagtattggggcgcgtggcctagtccgtcgatctatgatgata

SEQ ID NO: 1175 - DNA, 534 bp, Zea mays
atgctgtgtccatgcatgcatcatgttctcgtatataatgtcagtggcacgttcgttcgatcgtccgcgtgtatatctcagtatctcgtgaaggagaaatccagtgaccccgcgcggcctgccggttcttgcgttgcagcgttccagtacagctcggcgcactcggtgctggaggtgagcgaggcggaccacggcgcgtgctcggcgagcaacccgctgcggtcgcaccagggccagagcaccaccatcccgctcaccaaggccggcacccgctacttcatctgcggcgcccccggccactgcgcctcgggcatgaaggtcgccatcaccgtctccggcggcggcggcggcggcagcagcagcgccgacaacaccgcgactccgtcgggtccctccgtgcgggcgacgaacacgaagccggcgtccggtggcgcgacgacgacggacgagtcggactccagcgcggctggcagcggcgcccgcctcgcgatgggcctgctgttcggggccgcgggcctcgctgcaataatgggc

SEQ ID NO: 1176 - DNA, 411 bp, Zea mays
atggctgggaagggaggaaaaggattgctcgccgcgaagacgacggcggccaagtcggcggagaaggacaaggggaagaaggcccccatctcacggtcctcccgcgcgggcctccagtttcctgttggacgaatccaccgtcagctgaagcaaaggactcaggcaaatggccgcgttggtgccactgcagccgtctactccgccgccatcctggagtacttaactgccgaggttctggagctggctgggaacgctagcaaggatctgaaggtgaagcgtatcacccctcgccacctacagttggccattcgcggagacgaggagctggataccctcatcaagggcaccatcgcaggtggaggcgtcatcccgcacatccacaagtccctgatcaacaagtcctccaaggag

SEQ ID NO: 1177 - DNA, 795 bp, Zea mays
atgaacagacaccggaattcaactggagcggcgatgaacacacacgacgaacaccaggacatacgtaacacacactcggggggagaaagacgaaggacggaaggacggtcacccacacgtacaggaacacagcattccgcgacgaccctgctggctgctgatactgatagacacgcacgcgcgcatctatccataatccatgcatggatgacttgcttacgaggaagccctgccgccgccgccagcgccggcacctgcacctcccccggcgccggcctcctgcgccctgccctggatggcctggcctgcctgcgcggtcttgtggcccgcgtgcgccgcggcctccgccatcctgcggtgcgcctcctccacgtagtccggggtgcgctggaacgcctgccgcgccgtgttggcgaggcacgtgagcgaggacaggcccccgagccccagcgcgcccgacgtgaggaaccccatgacggccgtcccgatgagcagcgcggcggggaccagcacggggctgaagatcaggaacaccggcgtggccacggccagccccaccacggaggccgtcagcgccagccccgacagcaccagcagcagcccgcccagcgggaacagcgtcgccaccgtcagcgcctgcgacgccgtcggccccttgtcgtggagcatgcccttcacctgctcacccatcgggcgaccgcctcctccctgctgctgctgctgcccgtaggtggcgtgggcgccgccgtagatgccgctgcggtcacggtccgccattgctgccgtctcgttggc

SEQ ID NO: 1178 - DNA, 846 bp, Zea mays
atgcacacagaacatagcaggagtagtatatacatacacaccacagcaccgacagaggatgggcaggatgtcttattcgcaaattggaacccttcccaatttgccaaaccgaggacgacgagatgggaatcagatctcctcgaccacgatccagtcctcctcgccgtcggagaactccagcgcgatggtggtgccaaccatgcagaaccccatgtcgtcgccgtcgtcctccacctcctcctcctcgccatccttggcatccagcagcccctgctcttcaactgcctgaatctctcctacagcatccacgccgtcctcctcttgcccgcggccgacgaagaggtcgtagaggtcagagagccggccgtcgggcgccgctccgccctcgtcgtcgtcctcctcctcctcgtgccagctgcttccaccggccaggtacgccagcagggaggaggcggacgcgccgctgtacccggggccctggtcgacgacgcgccaggacacgaggcggtggttgagcgcgacgtcgcaggcgcgcagcttgcgcgcgcccttggccttgtcgcgcgccttggagaccgggtgcgcgtggcagcccgcgcaccgggcccgccggcacttgcccgtgctccgggacgcgttcgtcggcttcctcgccgccgccgccgccgtttccacgaccgcgtcggcgtcggagttgtcgtcgccggcggccgtcctcagcaccttgctgcggctgccccggacggcgccgtgctgccatccgtccctcttcatcgtccggcttcggctgggattgcgggtttcgtggggggtggcttgtttggttggaggagcgaggagaggagg

SEQ ID NO: 1179 - DNA, 660 bp, Zea mays
atggcgacgaccacctcgccgccgctgcagctcgccagcgcctcccgcccgcacgcctccgcctccggtggtggcggcggaggtggggttctcctcgctggcggttccggaggtggggtcgcgccaggttggggtcgagggcgattgcagcggcgggtgtcagcgcgcagcgtggcgagcgatcgggacgtgcaaggccccgtctcgcccgcggaagggcttccaagtgtgctaaactccatcggctcatctgccattgcatcaaacatcaagcaccatgcagagttcgctcccttgttctctccagatcacttttctcccctgaaagcttaccatgcgactgctaaaagtgtccttgatgcgctgctgataaactggaatgcgacatatgattattacaacaaaatgaatgtaaaacaagcatattacctgtccatggagtttttaccgggaagggctctcacaaatgctattggcaatctagagattaccggtgaatatgcagaagcattaaaacaacttggacaaaacctggaggatgtcgctagccaggaaccacatgctgccctcggcaatggtgggttaaggccgcctggcttcttgttttttggattctttagcaacattaaattattcaccctggggatatggacttcccta

SEQ ID NO: 1180 - DNA, 267 bp, Zea mays
atgacccgtgtggcaccaggattactgctcctaactttgtcaatcgacaccatggaaaaagtggggattctgatccgcaccacaaaacggcaccaaacgagtcacagtgcagtctggccggtggacgatgaggtcatgatgttcagtgtctccgtcacagaagacatggcgctcagcgccgccttaaggacatcctgcgagcacccaggcttcacaatgctcttcaccttctccaggtattcctgcaatttctttatcctgcccatg

SEQ ID NO: 1181 - DNA, 474 bp, Zea mays
atggctcggtcacaaaaaaatagcagcatggggaagttggcaggtcaggtaaacaaaacgaccgatcaaaactctgcgaaagggtggatttctgattgcaacgctcgattttctcccctacacaaaatgatgcaacccggagtagcgtttctggtattctgttgctcttctgcgtcgtctctaggtagcaccagcatgcgagatatctttgccgaaaagcccagcgattgctttccctggatcctcctgcttgatgagggattccccgacgagaaccgctttgaccccagcgttttgaacgaacgagatatcatcaggagtgaacagcgcagattctcctacaacaattacatccttttgagctataacctgtcctcgttcaccttccagaagcttttttgtgtttgtaatatcaacttcaaatgtctcgagattacggttattgatgccgatgagctgtacaccatcaatccc

SEQ ID NO: 1182 - DNA, 675 bp, Zea mays
atgcggcggctatggcggtggtaccagcagtgcctggccgcgcacccggtgcgcacgcaggtcgtcagctccggcatcctctggggcctcggcgacatcggcgcccagaccgtcacctactactccgctagccccgaccgtcgcggccacgacagcagccctcccgaccccgaggataaagataataaagacaataaagagtttaaagttgattggaagagggtgggcatcacaagctccttcggatttgcttttgttggtccagttgggcattactggtatgaatacctggatcgcatcatccggcggaggtttcagcctaacacgttcaaattcgtcgcctcaaaagttgccgcggatggattcctcttcggaccactagacctcctcctgttcttctcatatgttggtctgggtcaaggaaggagcatagagcaggtgaaggaggacgtgaagagggacttcattccggctctggtgttaggcggaaccatctggcctgctgtgcagatcgcgaacttccgcttcgttcccgtgcggtaccagctcctgtatgtgaacttgttctgcctcctggacagctgcttcctgtcgtggattgagcagcagggtgacgcctcctggaagcggtggttcacttcgttccagaaaatcgaagaccagaagggtaaggtt

SEQ ID NO: 1183 - DNA, 537 bp, Zea mays
atggcggccgggcgagagctggtggtgagtttcggcgagatgttgatagacttcgtgcccaccgtggcgggggtctcgctggcggaggcgccggccttcctcaaggcgcccgggggcgcgcccgccaacgtcgccatcgcggtctcgcgcctcggcggcggggccgcctttgtcggcaagctcggcgacgacgagttcggccgcatgctcgccgccatcctccgcgacaacggcgtcgacgacggcggcgtcgtcttcgactccggcgcgcgcaccgcgctcgccttcgtcaccctgcgcgccgacggggagcgcgagttcatgttctaccgcaaccccagcgctgacatgctcctcaccgccgacgagctcaacgtcgagctcatcaagagggctgcggtcttccactacggatcaataagcttgattgctgagccttgccggacagcacatctccgtgccatggagattgccaaagaggcaggtgcactgctctcttatgacccaaaccctgagggaggcactatggccatcccg

SEQ ID NO: 1184 - DNA, 594 bp, Zea mays
atggcgaggcggctgctggcggcggtcgccatagtagtcgtggccgccgcgctcgcgtgcggcgcgggcgcgcagctctcggcggggttctactcgtcgagctgccccgccgtgcacagcatcgtgcgccaggccatgtcgcaggccgtcacgaacaacacgcgcagcgccgccgccgtgctccgcgtcttcttccacgactgcttcgtcaatggctgcgacgcctcgctgctgctggacgacacgcccacgacgcccggcgagaagggcgccggccccaacgccggcggctccaccgtcggcttcgacctcatcgacaccatcaaggcgcaggtcgaggccgcctgccccgccaccgtctcctgcgccgacatcctggcgctcaccgcgcgcgacggcgtcaacctgctcggcggcccgagctgggccgtgccgctgggccggcgcgacgcgacgttccccaacagcacgggcgcggcgacggacctcccgggcccggactccgacctggccggcctggtggccgggttcgccgccaagggcctgagcccgcgcgacctcgcggcgctgtcgggcgcgcacacggtgcggatg

SEQ ID NO: 1185 - DNA, 348 bp, Zea mays
atggtatttgcaaagtcaaaatctgaagaaagcatggatcagtggtctgaaataccttcagatgtggaatccttcagagaaggtaaaaggtacctcagtagcgaggagctgagtgacgttgatagtgccaacgttgttgtcatggacaaatacatggattcactcctctctgaccggaggaaccttccctacgctagctcctcggtgcgccgggattcagtcagacgaaaacctgcttcgtccgccgattacagccgccgacctccgcagccaactccacctgcatcgctgtcaaagaaggaatcgtgggatgtcattgaagattcggagttcgatatacttgacagt

SEQ ID NO: 1186 - DNA, 690 bp, Zea mays
atgcgccacctccccaagcaccccaacatcgtcacgctcagggatacctacgaggacgacaatgccgtgcacctcgtcatggagctctgtgagggtggggagctcttcgaccgcatcgtggcgcgggggcactacacggaacgcgctgccgccttggtcacacgcactatcgtcgaggtcgtgcagatgtgccataagcatggagtgatgcacagggatctcaaaccagaaaatttcttgtttgcgaacaaaaaagaatcagcagcccttaaggccattgattttggcctgtctgtatttttcactccaggcgaacggtttacagagattgttgggagtccttattacatggccccagaggtactaaagagaaattatggcccagaggttgatgtttggagtgcaggggtgattctgtacattcttctctgtggtgtccctccattctgggcagaatcggagcaaggtgttgctcaggcaattatccgatctgtcattgatttcaaaagagatccatgggcaagggtctctgataatgccaaagaccttgtaagaggaatgctcaacccagatccaaagcgacgattgacagctcagcaagtgcttgatcacccatggttacagaacattaagagggctccaaatgtcaatttgggcgaaactgttaaggccagacttcaacattctctg

SEQ ID NO: 1187 - DNA, 765 bp, Zea mays
  misc_feature (753)..(754): n = any nucleotide
atggcggcggcggcagtgacgtccaacggcggcgcagtggccgcgaacgggccggcgcccggcaggctggcctccgtgtacagcgaggtgcagacgagccggctcctgcacacgctgcccctcccctccgtcctccgctccaacttctcggtcgtcgacggccccgccagctccgccgcgggtaaccccgatgagatcgccaagctcttccccaacctgttcggccagccctcggcgtcgctggtgccttcggccgagcccgcggcgaccaggccgctaaaggtcggtgtcgtgctctctggtggacaggcgcccggcgggcacaatgtcatctgcggcatctttgattaccttcaggagcgtgcaaaaggtagcaccttgcttggattcaagggaggccctgctgggatcatgaagtgcaaatatgtggaactcacttcagactttgtgtatccctacagaaaccagggcggattcgatatgatctgcagtggaagggacaagattgaaacaccggagcagttcaagcaagctgaagacacagccaacaagcttgatttggatggacttgttgtcattggtggtgatgattcaaacaccaatgcctgccttcttggtgaatactttaggtcaaggaacctgaagactcgtgttattggttgcccaaagactatcgatggagatctgaaatgtaaggaggtaccaacagctttggatttgatactgcttgcagatatactcccgaatgattgnncatgttatgac

SEQ ID NO: 1188 - DNA, 501 bp, Zea mays
atgatgatggccgaggtggtggccaaccacagcaaaaggagccacaccgacggctacttcagtgccaaagccgccgtcgccgccgccgccgccgcgagcccgccagaggagttgggaagcatgcccatgtcctcgaagaagccgaggccgaggaatagcaacagcccgagaaccgcgcccgtatcgcccaaggagaagaaggacaggatcggcgagagagtcgcggcgctccagcagctagtgtcgccgttcgggaagacagacacggcttccgttctgcaggaggcctcggggtacatcaggttcctgcaccagcagctccaggtcctcagctccccttacatgcgtgctcctccggctgccggcgccgcgcctgaggatcccgagcactacagcctccggagccgcgggctgtgcctggtgccggtggaccagacactgcagctgacccagagcaacggggccgacctgtgggcgccggcgaacacgaccaggcgcagg

SEQ ID NO: 1189 - DNA, 198 bp, Zea mays
atgacagacttgggtccggtgcagcccatggtcgtcccgagccctccgttgagcttgagcacaacgagcttgtccagcagcttcttcgtctcctcgagatcttcaggaggcgacgtgagggtatcgtacggcaccactacctcatcggtcggggtctggatcttgctccactcgatctgctccgcctccccactgagg

SEQ ID NO: 1190 - DNA, 453 bp, Zea mays
atggctccggcggcgcgcgcaccatccgagttcagccgcgtgttctcggcgctggaccgcgacggcgacggcaagctgtcggcggccgagctgcgggcgtgcatgagggcggcgctgggcgaggacgtgtcggcggaggaggcggaccgcctggtggcgtcggcggatggcgacggcgacgggctgctgagccaggaggagctgctggcgctggcggggacaacggcggcggaggaggaggaggaggaggagcgacggcgggggctgagggaggcgttccggatgtacgccgtggaagggcagggctgcatcacgccgctgagcctgaagcggatgctcgccaggctcggctcccaccaggacgttgccgagtgcacggccatgatctgcaggttcgacctcgacggcgacggcgtgctcagcttcgaggaattcagggtcatgatggatgca

SEQ ID NO: 1191 - DNA, 297 bp, Zea mays
atgaagagaggtgagtcgcttggccttctcggtatgtggaaagtatatggacatgtcagctccaggagagactatattgaactttggatcgaagacatcgatcccatggacaactcggtacagaccaggcagagtaaaggcagtatgactctcatactgtccaacagtatttttgcttccagcgatttcttggtatgtgctggtgatgataaaatcagcattgttcatagcaattatatcagccgtgaactgacaggagaaatggtacttctcatcgaaattcttccaaaatatgtc

SEQ ID NO: 1192 - DNA, 342 bp, Zea mays
atgcccatcacgtcgagttcacccggaggtggtggaggcgcggtcgcggcagtcggcggccgtctccgtcgccgtcgccacctcgcgcctgtggaagctgcggtggcacccgcaggcggcgcacgtgagcgccaccgccgtgccgtccgcgctggacgccatgaactcgcggcacccgtccacggcgtgcccgccgacggacgccgcgtggttgcgctggcactcgcggtaccgcaccacctgcttcgcggcggcctccttgcgcctcgccgccgtgccgccgttcgccgtggacgaccgcccgtcttgctgaggccccatatatatgtgtatgtaatgatc

SEQ ID NO: 1193 - DNA, 780 bp, Zea mays
  misc_feature (686)..(686): n = any nucleotide
atgtgtttcagtgcaaggggtgctgtgagcagcacgcagtgtgtgctcacatcagatgctggcccagacactcttgtcgtccgaacatcctttcggaggaattatgctgatcctaatgaagtcgctgccgtcattttgggtggtggtaccgggactcagcttttccctctcacaagcacaagggccacccctgctgttcctattggaggatgttacaggcttattgatatccccatgagcaactgtttcaacagtggcataaacaagatatttgttatgactcagttcaactcagcttctcttaaccgtcacattcatcgtacctatcttggtggggggatcaacttcactgatggatctgttgaggtgctggctgcaacacaaatgcctggggaggctgctggttggttccagggcacagcagacgccgttagaaaatttatctgggtacttgaggattattacaagcataaagctatagaacacattttgattttgtcaggagatcaactctatcgtatggattacatggagcttgtgcagaaacatgtcgatgacaatgcagacataactttatcatgcgctcctgttggagagagtcgagcatctgactatggattagttaagttcgatagttcaggccgtgtaattcagttctctgagaaaacagagggtgctgccttggnaagaaatgaaagtgggataccagcttcctcaatttcggcattggatccccagcctgaatatccctatatcgcttcaatgggagtttacgttttt

SEQ ID NO: 1194 - DNA, 384 bp, Zea mays
atggtgactcctggctccgactctaagaaggtgacacctgaggtgatcgcccagtacaccgtccgtaccctccagaggaccgtccctgctgctgtgcctgctgttgtcttcctctccggtggacagagcgaggaggaggccaccctgaatctcaatgccatgaacaagctcagcaccaagaagccatgggccctgtccttctccttcggccgtgccctccaggcgagcaccctcaaggcctgggctggcaaggtggagaacgtggagaaggctagagcggccttcctcgccaggtgcaaggccaactccgaggctaccctcggcacctacaagggtgatgctgccgccgacaccgagagccttcacgtcaaggactacaagtac

SEQ ID NO: 1195 - DNA, 237 bp, Zea mays
atgcgttgccggggtgggtgtcgagcggggcgtgttctggggccgtgggcttggggggggcaccgaggctttggaggtttggaggcgtcttgcggcctccaagaggtgtgtttcaggggtcagcgtggcgcggcatgtgcgcgggccggcggtgtttcggtgcgtgcgggtgacgtccgtggacgacggcggcggcggcggcggcaccaaacgggaaggtcgggtaccaggcggcgg

SEQ ID NO: 1196 - DNA, 387 bp, Zea mays
atggtgacgcccggcgcggaggccaaggacagggccaccccggagcaggtggccgcgtacaccctcaagctcctccaccgccggatccccccctccgtgcccgggatcatgttcctctccggcgggcagtcggaggtggaggcgacgcagaacctcaacgccatgaaccaggggcccaacccgtggcacgtgtccttctcctacgcgcgggcgctgcagaacacctgcctcaagacctggggcggccagccggacaaggtcaaggcggcgcaggacgcgctgctgctgcgcgccaaggccaactccctggcgcagctcggcaagtacacctccgacggcgaggccgccgaggccaaggagggaatgttcgtcaagaactacagctac

SEQ ID NO: 1197 - DNA, 780 bp, Zea mays
  misc_feature (110)..(110): n = any nucleotide
atgtcgtcgaacgccggtagagagcccagctccgggaacgggtcgtcgtcgatctccgatccgggcgtccgcgtgtcggagtgggagtgcgagagcgacgcctccgactnccatcgccttcttctccttctccttctgctgctgcatcttctcccactcgttcttcttgttgtacaggcggcacagcacccagtcatccagcctgagcgtgccggcgccggacttcttggcgcgggcgccgccggcttcggcgaggcggtactcgtgcatgatccactccgtcttgaccccgcgcggcggcttgccgtggtagaacacgagcgccttcttgatccccgccgtccggccctcgtgctccacgggcttgtccgcgcccgtggccttccagtagcccgacccggcggcgcggttggggcgggagccgttggggtacttgcggtcccgcggcgtgaagaagtaccactcgcggcgcccgaagagggcgcgctccggcaggtcccaggggtcgaagcggtacaggtcgacctcggcgatgatggacaccggcgggcggcgccccgcggcgcgcgcgcagaggtagtgcgccaccagctcctcgtccgtcgggtggaaccggaagcccgggggcaggttgagctccgcctccgcgtcgcggcgctgctgctgctgctgctgctgcacggccgccatcgctaccattggacgctttactcgctcgctgtggcctgtgggttggttggttggttcggttgttggctggcggctagctgctgcgggagg

SEQ ID NO: 1198 - DNA, 432 bp, Zea mays
atgggaccccgcggcgtcgccctagcgctcctcgcggcggcgctcctccaggccctcgcccccgcgtcggcggcggcggcggcggcggcggcggcggggggcctggtgcggctcgcgctgaagaagcagcccgtcgaccagaacgcccgcgtcgccgcgcgcctctccgctgaggagaggcagcgcctcctcctccgcggcgccaacgccctgtgctcggccggcggcgacgacgactccgacgtcatcgcgctcaataactacatgaacgcgcagcactttggggagatcggcgtcgggacgccgcccgcagaagttcaccgtcatcttcgacaccggcagctccaacctctgggcgccgtcctccaagagctatttctcgacagcttgctacttccactcgcgctaccagcacggcgcagccagtactta

SEQ ID NO: 1199 - DNA, 468 bp, Zea mays
atggcggcgtcggatgttgagtaccgctgcttcgtcggcggcctcgcctgggccacggacgaccactccctccacaacgccttcagcacctacggcgaggtcctcgagtccaagatcatcctcgatcgggagacgcagaggtcccgcggcttcggcttcgtcaccttctccacggaggaggcgatgcggaacgccatcgagggcatgaacggcaaggagctggacggccgcaacatcaccgtcaacgaggcccagtcccgcggcggccgtggaggcggcggcggtgggtacggtggtggccgtggaggcggcggctacggcggtggcgggcgccgtgatggcggtggcggctacggcggcggcggcggctacggggccggcggcggctacggtgctgctggccgccgcctacagcggcgccaaccgcggcgacggcttaccgcaactccctccgcgaactggaggaac

SEQ ID NO: 1200 - DNA, 369 bp, Zea mays
atgaggcgcgcgacaacgcccggggcggccccatcggccggatgtggcagcgtcggcggtggcggcgaggcagcagtaggcgggcacgggagcctgcgtggggacgaggagcggagggacgaagggaggaggcgacgcggggagaagagcctgcgcttgcaggcgaggcggcggtgccagtccaggaggtggaagagcacgccgcccgtgcagccgccgccggggaacggcggcggcttcttctccactatagcgaggctgctcatccctctccctccgcctcacctgctggaaaaaaccaagtcggccgtgccgctcggggccccgtgctttaaccgacccgtgcttcgatccgggagctggaaggtg

SEQ ID NO: 1201 - DNA, 783 bp, Zea mays
atggcatcgtcgagggtgataccgtcgtcctcgccgtcgcacacggcctcggatctcgcgcgcctagcgcaggccgccagcaggcccggcggcgggggcagcgggccgggctccatgaacgtcgaggagctcctccgcggcatctacagcgacatgcccaccccggcgccgcccgcgtcggaacccagacgcccgatgcccccggccccggcgccggtgagcgccacgcggaagacggcggaggaggtgtggaaggagatcactggcggaggtggcagtggggaagccgtggctcccgtggcggctcatgctgtcgctcccgatggtggcgctggcacaggcggcccggaggtgacgctggaggacttcctggccagggagagcgcggtgaaggaggatgaggttaagatttctgtcccccccgcgccggtcatggggttaccgggcggagcggagggcgtgagtgtgcctggcggcggaggcgggagggaacggaagcggcagcttgtgagtacagtggatcgcgctcgctctgctatccagcgagagaaacgaatgataaaaaaccgcgagtctgctgccaggtcacgggagaggaagcaggcctatatcgccgagctagaatacatggtaacgcggctcgcggaggagaaagctgagttgttgagacaacaggaagagcagttccagacgcggcttgaagagctcgtggaccgagcgacgccagccattctgaggaaaaaaacatcacgagatcttagaagaacgaactcaatgcagtgg
